(19) United States
(12) Patent Application Publication
(10) Pub. No.: US 2009/0291081 A1
(43) Pub. Date: Nov. 26, 2009

(54) Dual-specific IL-1A/IL-1b antibodies

(76) Inventors: Chung-Ming Hsieh, Newton, MA (US); Bradford L. McRae, Northborough, MA (US); Yuliya Kutskova, Northborough, MA (US); John E. Memmott, Framingham, MA (US); Michael Roguska, Ashland, MA (US); Ian Tomlinson, Cambridge (GB); Carrie Enever, Cambridge (GB); Steven Grant, Ely (GB); Mihriban Tuna, Cambridge (GB)

Correspondence Address: LAHIVE & COCKFIELD, LLP;FLOOR 30, SUITE 3000, ONE POST OFFICE SQUARE, BOSTON, MA, 02109, US

(21) Appl. No.: 12/006,068

(22) Filed: Dec. 28, 2007

Related U.S. Application Data
(60) Provisional application No. 60/878,165, filed on Dec. 29, 2006.

(51) Int. Cl. A61K 39/395; C07K 16/18; C12N 15/11; C12N 15/00; C12N 5/06; C12P 21/04; A61P 37/00

(52) U.S. Cl. 424/136.1; 530/387.3; 536/23.53; 435/320.1; 435/325; 435/69.6

(57) ABSTRACT

The invention provides an isolated, dual-specific antibody, or an antigen-binding portion thereof, which is specific for human IL-1α and human IL-1β. The dual specific antibodies of the invention also neutralize both human IL-1α and human IL-1β. The invention also provides domain antibodies (dAbs) specific for human IL-1α and human IL-1β.

### RELATED APPLICATIONS

[0001] This application claims priority to U.S. Provisional Appln. No. 60/878,165, filed on Dec. 29, 2006, which is incorporated in its entirety herein.

### REFERENCE TO JOINT RESEARCH AGREEMENT

[0002] Contents of this application are under a joint research agreement entered into by and between Domantis Limited and Abbott Laboratories on Oct. 25, 2002, and directed to recombinantly engineered antibodies to IL-1.

### BACKGROUND OF THE INVENTION

[0003] Cytokines, such as interleukin-1 (IL-1) and tumor necrosis factor (TNF), are molecules produced by a variety of cells, such as monocytes and macrophages, which have been identified as mediators of inflammatory processes. Interleukin-1 is a cytokine with a wide range of biological and physiological effects, including fever, prostaglandin synthesis (in e.g., fibroblasts, muscle and endothelial cells), T-lymphocyte activation, and interleukin 2 production.

[0004] cDNAs coding for two distinct forms of IL-1 have been isolated and expressed; these cDNAs represent two different gene products, termed IL-1β (Auron et al. (1984) Proc. Natl. Acad. Sci. USA 81:7909) and IL-1α (Lomedico et al. (1984) Nature 312:458). IL-1β is the predominant form produced by human monocytes both at the mRNA and protein level. The two forms of human IL-1 share only 26% amino acid homology. Despite their distinct polypeptide sequences, the two forms of IL-1 have structural similarities (Auron et al. (1985) J. Mol Cell Immunol. 2:169), in that the amino acid homology is confined to discrete regions of the IL-1 molecule.

[0005] The two forms of IL-1 possess similar biological properties, including induction of fever, slow wave sleep, and neutrophilia, T- and B-lymphocyte activation, fibroblast proliferation, cytotoxicity for certain cells, induction of collagenases, synthesis of hepatic acute phase proteins, and increased production of colony stimulating factors and collagen. As such, both forms of IL-1 have been implicated in the pathophysiology of a variety of human diseases and disorders, including autoimmune and inflammatory diseases, e.g., multiple sclerosis (Brosnan et al. (1995). Neurology 45(6 suppl 6):

[0006] Antibodies capable of binding of IL-1α and IL-1β have been described in the art (see US Publication No. 20030040083 and PCT publication WO 07/063,308). However, there exists a need for improved therapeutics to IL-1α and IL-1β.

### SUMMARY OF THE INVENTION

[0007] High levels of IL-1α and IL-1β are major concerns in the management and treatment of inflammatory disease. The invention provides a therapeutic means with which to inhibit both IL-1α and IL-1β by providing compositions and methods for treating disease associated with increased levels of IL-1α/IL-1β, particularly inflammatory disorders.

[0008] The invention includes an isolated, dual-specific antibody, or an antigen-binding portion thereof, which dissociates from human IL-1α with a K_{D} of 3×10⁻⁷ M or less; dissociates from human IL-1β with a K_{D} of 5×10⁻⁵ M or less; and does not bind mouse IL-1α or mouse IL-1β.

[0009] In one embodiment, the antibody, or antigen-binding portion, neutralizes human IL-1α in a standard in vitro assay with an ND₅₀ of 900 nM or less.

[0010] In one embodiment, the antibody, or antigen-binding portion, neutralizes human IL-1β in a standard in vitro assay with an ND₅₀ of 800 nM or less.

[0011] In one embodiment, the antibody, or antigen-binding portion, neutralizes human IL-1α in a standard in vitro assay with an ND₅₀ of 900 nM or less, and neutralizes human IL-1β in a standard in vitro assay with an ND₅₀ of 800 nM or less.

[0012] In one embodiment, the antibody, or antigen-binding portion, neutralizes human IL-1α in a standard in vitro MRC5 assay with an ND₅₀ of 900 nM or less, and/or neutralizes human IL-1β in a standard MRC5 in vitro assay with an ND₅₀ of 800 nM or less.

[0013] In one embodiment, the antibody, or antigen-binding portion, dissociates from IL-1α with a K_{D} of 1×10⁻⁸ M or less; dissociates from IL-1α with a K_{D} of 1×10⁻⁹ M or less; dissociates from IL-1α with a K_{D} of 40-86 nM or less; dissociates from IL-1α with a K_{D} of 20-42 nM or less; dissociates from IL-1α with a K_{D} of 32-42 nM or less; dissociates from IL-1α with a K_{D} of 7-12 nM or less; dissociates from IL-1α with a K_{D} of 3.0×10⁻⁷ M or less; dissociates from IL-1α with a K_{D} of 1.1×10⁻⁷ M or less; dissociates from IL-1α with a K_{D} of 6.1×10⁻⁸ M or less; dissociates from IL-1α with a K_{D} of 6×10⁻⁸ M or less; dissociates from IL-1α with a K_{D} of 4.2×10⁻⁸ M or less; dissociates from IL-1α with a K_{D} of 1.3×10⁻⁸ M or less; or dissociates from IL-1α with a K_{D} of 1.1×10⁻⁹ M or less.

[0014] In one embodiment, the antibody, or antigen-binding portion thereof, dissociates from IL-1β with a K_{D} of 5.4×10⁻⁵ M or less; dissociates from IL-1β with a K_{D} of 2.8×10⁻⁶ M or less; dissociates from IL-1β with a K_{D} of 1.3×10⁻⁶ M or less; dissociates from IL-1β with a K_{D} of 9.3×10⁻⁷ M or less; dissociates from IL-1β with a K_{D} of 2×10⁻⁷ M or less; dissociates from IL-1β with a K_{D} of 1.1×10⁻⁷ M or less; or dissociates from IL-1β with a K_{D} of 2.8×10⁻⁸ M or less.

[0015] In one embodiment, the antibody, or antigen-binding portion thereof, neutralizes IL-1α in a standard in vitro assay with an ND₅₀ of 10 nM or less. In one embodiment, the antibody, or antigen-binding portion thereof, neutralizes IL-1β in a standard in vitro assay with an ND₅₀ of 200 nM or less. In one embodiment, the antibody, or antigen-binding portion thereof, neutralizes IL-1α in a standard MRC5 in vitro assay with an ND₅₀ of 10 nM or less. In one embodiment, the antibody, or antigen-binding portion thereof, neutralizes IL-1β in a standard in vitro MRC5 assay with an ND₅₀ of 200 nM or less.

[0016] In another embodiment, the antibody, or antigen-binding portion thereof, of the invention comprises a heavy chain variable region comprising complementary determining regions (CDRs) as set forth in SEQ ID NO: 16 (ABT1-96) and a light chain variable region comprising CDRs as set forth in SEQ ID NO: 36 (ABT242).

[0017] In still another embodiment, the antibody, or antigen-binding portion thereof, of the invention comprises a light chain variable region comprising CDRs as set forth in SEQ ID NO: 24 (ABT1-122) and a heavy chain variable region comprising CDRs as set forth in SEQ ID NO: 52 (ABT2-108).

[0018] In one embodiment, the antibody, or antigen-binding portion thereof, of the invention comprises a light chain variable region comprising CDRs as set forth in SEQ ID NO: 28 (ABT1-141) and a heavy chain variable region comprising CDRs as set forth in SEQ ID NO: 52 (ABT2-108).

[0019] In yet another embodiment, the antibody, or antigen-binding portion thereof, of the invention comprises a heavy chain variable region comprising CDRs as set forth in SEQ ID NO: 16 (ABT1-96) and a heavy chain variable region comprising CDRs as set forth in SEQ ID NO: 32 (ABT2-13).

[0020] In still another embodiment, the antibody, or antigen-binding portion thereof, of the invention comprises a heavy chain variable region comprising CDRs as set forth in SEQ ID NO: 4 (ABT1-6-23) and a second heavy chain variable region comprising CDRs as set forth in SEQ ID NO: 40 (ABT2-46).

[0021] In another embodiment, the antibody, or antigen-binding portion thereof, of the invention comprises a light chain variable region comprising CDRs as set forth in SEQ ID NO: 28 (ABT1-141) and a heavy chain variable region comprising CDRs as set forth in SEQ ID NO: 44 (ABT2-65).

[0022] In another embodiment, the antibody, or antigen-binding portion thereof, of the invention comprises a heavy chain variable region comprising CDRs as set forth in SEQ ID NO: 16 (ABT1-96) and a light chain variable region comprising CDRs as set forth in SEQ ID NO: 40 (ABT246).

[0023] In another embodiment, the antibody, or antigen-binding portion thereof, of the invention comprises a light chain variable region comprising CDRs as set forth in SEQ ID NO: 12 (ABT1-95) and a heavy chain variable region comprising CDRs as set forth in SEQ ID NO: 32 (ABT2-13).

[0024] In yet another embodiment, the antibody, or antigen-binding portion thereof, of the invention comprises a light chain variable region comprising CDRs as set forth in SEQ ID NO: 24 (ABT1-122) and a heavy chain variable region comprising CDRs as set forth in SEQ ID NO: 44 (ABT2-65).

[0025] In another embodiment, the antibody, or antigen-binding portion thereof, of the invention comprises a heavy chain variable region comprising CDRs as set forth in SEQ ID NO: (ABT1-98) and a light chain variable region comprising CDRs as set forth in SEQ ID NO: 48 (ABT2-76).

[0026] In another embodiment, the antibody, or antigen-binding portion thereof, of the invention comprises a heavy chain variable region comprising CDRs as set forth in SEQ ID NO: 4 (ABT1-6-23) and a second heavy chain variable region comprising CDRs as set forth in SEQ ID NO: 32 (ABT2-13).

[0027] The invention also includes an isolated antibody, or an antigen-binding portion thereof, having dual-specificity for human IL-1α and human IL-1β comprising a variable light chain comprising complementary determining regions (CDRs) as set forth in an amino acid sequence selected from the group consisting of SEQ ID NO: 12, SEQ ID NO: 24, and SEQ ID NO: 28, or a variable heavy chain comprising CDRS as set forth in an amino acid sequence selected from the group consisting of SEQ ID NO: 4, SEQ ID NO: 8, SEQ ID NO: 16, and SEQ ID NO: 20.

[0028] In one embodiment, the antibody, or antigen-binding portion thereof, dissociates from human IL-1β with a K_{D} of 5×10⁻⁵ M or less; dissociates from IL-1β with a K_{D} of 5.4×10⁻⁵ M or less; dissociates from IL-1β with a K_{D} of 2.8×10⁻⁶ M or less; dissociates from IL-1≢ with a K_{D} of 1.3×10⁻⁶ M or less; dissociates from IL-1β with a K_{D} of 9.3×10⁻⁷ M or less; dissociates from IL-1β with a K_{D} of 2×10⁻⁷ M or less; dissociates from IL-1β with a K_{D} of 1.1×10⁻⁷ M or less; or dissociates from IL-1β with a K_{D} of 2.8×10⁻⁸ M or less.

[0029] In one embodiment, the antibody, or antigen-binding portion thereof, of the invention neutralizes human IL-1β in a standard in vitro assay with an ND₅₀ of 800 nM or less; neutralizes human IL-1β in a standard in vitro MRC5 assay with an ND₅₀ of 800 nM or less; neutralizes IL-1β in a standard in vitro assay with an ND₅₀ of 200 nM or less; neutralizes IL-1β in a standard in vitro MRC5 assay with an ND₅₀ of 200 nM or less.

[0030] The invention also includes an antibody, or antigen-binding portion thereof, which dissociates from human IL-1β with a K_{D} of 5×10⁻⁵ M or less and neutralizes human IL-1β in a standard in vitro MRC5 assay with an ND₅₀ of 800 nM or less.

[0031] In one embodiment, the antibody, or antigen-binding portion thereof, of the invention comprises variable light chain CDRs as set forth in an amino acid sequence selected from the group consisting of SEQ ID NO: 36, SEQ ID NO: 40, and SEQ ID NO: 48, or variable heavy chain comprising CDRS as set forth in an amino acid sequence selected from the group consisting of SEQ ID NO: 32, SEQ ID NO: 44, SEQ ID NO: 52.

[0032] The invention provides an isolated antibody, or an antigen-binding portion thereof, having dual-specificity for human IL-1α and human IL-1β comprising a variable light chain comprising CDRs as set forth in an amino acid sequence selected from the group consisting of SEQ ID NO: 36, SEQ ID NO: 40, and SEQ ID NO: 48, or a variable heavy chain comprising CDRS as set forth in an amino acid sequence selected from the group consisting of SEQ ID NO: 32, SEQ ID NO: 44, SEQ ID NO: 52.

[0033] In one embodiment, the antibody, or antigen-binding portion thereof, of the invention dissociates from IL-1α with a K_{D} of 3.0×10⁻⁷ M or less; dissociates from IL-1α with a K_{D} of 1.1×10⁻⁷ M or less; dissociates from IL-1α with a K_{D} of 6×10⁻⁸ M or less; dissociates from IL-1α with a K_{D} of 4.2×10⁻⁸ M or less; dissociates from IL-1α with a K_{D} of 1×10⁻⁸ M or less; or dissociates from IL-1α with a K_{D} of 1×10⁻⁹ M or less.

[0034] In one embodiment, the antibody, or antigen-binding portion thereof, of the invention dissociates from human IL-1α with a K_{D} of 1×10⁻⁷ M or less and neutralizes human IL-1α in a standard in vitro assay with an ND₅₀ of 900 nM or less. In one embodiment, the antibody, or antigen-binding portion thereof, neutralizes human IL-1α in a standard in vitro MRC5 assay with an ND₅₀ of 900 nM or less. In another embodiment, the antibody, or antigen-binding portion thereof, neutralizes IL-1α in a standard in vitro assay with an ND₅₀ of 10 nM or less. In still another embodiment, the antibody, or antigen-binding portion thereof, neutralizes IL-1α in a standard in vitro MRC5 assay with an ND₅₀ of 10 nM or less.

[0035] In one embodiment of the invention, the isolated antibody, or an antigen-binding portion thereof, comprises a variable light chain comprising CDRs as set forth in an amino acid sequence selected from the group consisting of SEQ ID NO: 12, SEQ ID NO: 24, and SEQ ID NO: 28, or a variable heavy chain comprising CDRS as set forth in an amino acid sequence selected from the group consisting of SEQ ID NO: 4, SEQ ID NO: 8, SEQ ID NO: 16, and SEQ ID NO: 20.

[0036] The invention describes an isolated antibody, or an antigen-binding portion thereof, having dual-specificity for human IL-1α and human IL-1β, comprising an IL-1α antigen binding region with a light chain variable sequence comprising a CDR3 selected from the group consisting of SEQ ID NO: 11, SEQ ID NO: 23, and SEQ ID NO: 27 or a heavy chain variable sequence comprising a CDR3 selected from the group consisting of SEQ ID NO: 3, SEQ ID NO: 7, SEQ ID NO: 15, SEQ ID NO: 19, and an IL-1β antigen binding region with a light chain variable sequence comprising a CDR3 selected from the group consisting of SEQ ID NO: 35, SEQ ID NO: 39, and SEQ ID NO: 47 or a heavy chain variable sequence comprising a CDR3 selected from the group consisting of SEQ ID NO: 31, SEQ ID NO: 43, and SEQ ID NO: 51.

[0037] In one embodiment, the light chain variable sequence of the IL-1α antigen binding region further comprises a CDR2 selected from the group consisting of SEQ ID NO: 10, SEQ ID NO: 22, and SEQ ID NO: 26. In another embodiment, the light chain variable sequence of the IL-1α antigen binding region further comprises CDR1 selected from the group consisting of SEQ ID NO: 9, SEQ ID NO: 21, and SEQ ID NO: 25. In one embodiment, the light chain variable sequence of the IL-1β antigen binding region further comprises a CDR2 selected from the group consisting of SEQ ID NO: 34, SEQ ID NO: 38, and SEQ ID NO: 46. In another embodiment, the light chain variable sequence of the IL-1α.antigen binding region further comprises CDR1 selected from the group consisting of SEQ ID NO: 33, SEQ ID NO: 37, and SEQ ID NO: 45.

[0038] In another embodiment, the heavy chain variable sequence of the IL-1α antigen binding region further comprises a CDR2 selected from the group consisting of SEQ ID NO: 2, SEQ ID NO: 6, SEQ ID NO: 14, and SEQ ID NO: 18. In one embodiment, the heavy chain variable sequence of the IL-1α antigen binding region further comprises CDR1 selected from the group consisting of SEQ ID NO: 1, SEQ ID NO: 5, SEQ ID NO: 13, and SEQ ID NO: 17. In one embodiment, the heavy chain variable sequence of the IL-1β.antigen binding region further comprises a CDR2 selected from the group consisting of SEQ ID NO: 30, SEQ ID NO: 43, and SEQ ID NO: 50. In one embodiment, the heavy chain variable sequence of the IL-1α.antigen binding region further comprises CDR1 selected from the group consisting of SEQ ID NO: 29, SEQ ID NO: 41, and SEQ ID NO: 49.

[0039] The invention also provides a dual-specific, isolated antibody, or antigen-binding portion thereof, comprising an IL-1α antigen binding region and an IL-1β antigen binding region, wherein the antibody, or antigen-binding portion thereof, comprises a heavy chain variable region and a light chain variable region combination selected from the group consisting of a heavy chain variable region comprising CDRs as set forth in SEQ ID NO: 16 (ABT1-96) and a light chain variable region comprising CDRs as set forth in SEQ ID NO: 40 (ABT2-46); light chain variable region comprising CDRs as set forth in SEQ ID NO: 24 (ABT1-122) and a heavy chain variable region comprising CDRs as set forth in SEQ ID NO: 52 (ABT2-108); a light chain variable region comprising CDRs as set forth in SEQ ID NO: 28 (ABT1-141) and a heavy chain variable region comprising CDRs as set forth in SEQ ID NO: 52 (ABT2-108); a light chain variable region comprising CDRs as set forth in SEQ ID NO: 28 (ABT1-141) and a heavy chain variable region comprising CDRs as set forth in SEQ ID NO: 44 (ABT2-65); a heavy chain variable region comprising CDRs as set forth in SEQ ID NO: 16 (ABT1-96) and a light chain variable region comprising CDRs as set forth in SEQ ID NO: 36 (ABT2-42); a light chain variable region comprising CDRs as set forth in SEQ ID NO: 12 (ABT1-95) and a heavy chain variable region comprising CDRs as set forth in SEQ ID NO: 32 (ABT2-13); a light chain variable region comprising CDRs as set forth in SEQ ID NO: 24 (ABT1-122) and a heavy chain variable region comprising CDRs as set forth in SEQ ID NO: 44 (ABT2-65); and a heavy chain variable region comprising CDRs as set forth in SEQ ID NO: 20 (ABT1-98) and a light chain variable region comprising CDRs as set forth in SEQ ID NO: 48 (ABT2-76).

[0040] In one embodiment, the invention provides antibody, or antigen-binding portion thereof, comprising an IL-1α antigen binding region and/or an IL-1β antigen binding region, wherein the antibody comprises SEQ ID NO: 4, SEQ ID NO: 8, SEQ ID NO: 12, SEQ ID NO: 16, SEQ ID NO: 20, SEQ ID NO: 24, SEQ ID NO: 28, SEQ ID NO: 32, SEQ ID NO: 36, SEQ ID NO: 40, SEQ ID NO: 44, SEQ ID NO: 48, SEQ ID NO: 52, SEQ ID NO: 53, SEQ ID NO: 54, SEQ ID NO: 55, SEQ ID NO: 56, SEQ ID NO: 57, SEQ ID NO: 58, SEQ ID NO: 59, SEQ ID NO: 60, SEQ ID NO: 61, SEQ ID NO: 62, SEQ ID NO: 63 SEQ ID NO: 64, SEQ ID NO: 65, SEQ ID NO: 66, SEQ ID NO: 67, SEQ ID NO: 68, SEQ ID NO: 69, SEQ ID NO: 70, SEQ ID NO: 71, SEQ ID NO: 72, SEQ ID NO: 73, SEQ ID NO: 74, SEQ ID NO: 75, SEQ ID NO: 76, SEQ ID NO: 77, SEQ ID NO: 78, SEQ ID NO: 79, SEQ ID NO: 80, SEQ ID NO: 81, SEQ ID NO: 82, SEQ ID NO: 83, SEQ ID NO: 84, SEQ ID NO: 85, SEQ ID NO: 86, SEQ ID NO: 87, SEQ ID NO: 88, SEQ ID NO: 89, SEQ ID NO: 90, SEQ ID NO: 91, SEQ ID NO: 92, SEQ ID NO: 93, SEQ ID NO: 94, SEQ ID NO: 95, SEQ ID NO: 96, SEQ ID NO: 97, SEQ ID NO: 98, SEQ ID NO: 99, SEQ ID NO:100, SEQ ID NO: 101, SEQ ID NO: 102, SEQ ID NO: 103, SEQ ID NO: 104, SEQ ID NO: 105, SEQ ID NO: 106, SEQ ID NO: 107, SEQ ID NO: 108, SEQ ID NO: 109, SEQ ID NO: 110, SEQ ID NO:11, SEQ ID NO:112, SEQ ID NO: 113, SEQ ID NO: 114, SEQ ID NO: 115, SEQ ID NO: 116, SEQ ID NO: 117, SEQ ID NO: 118, SEQ ID NO: 119, SEQ ID NO: 120, SEQ ID NO: 121, SEQ ID NO: 122, SEQ ID NO: 123, SEQ ID NO: 124, SEQ ID NO: 125, SEQ ID NO: 126, SEQ ID NO: 127, SEQ ID NO: 128, SEQ ID NO: 129, SEQ ID NO:130, SEQ ID NO: 131, SEQ ID NO: 132, and SEQ ID NO: 133, or CDRs from said sequences.

[0041] In one embodiment, the antibody, or antigen-binding portion thereof, of the invention has an IgG1 or an IgG4 heavy chain constant region.

[0042] In one embodiment, the antibody, or antigen-binding portion thereof, of the invention is an antibody fragment selected from the group consisting of a Fab, a Fab′, a Fab₂, a Fab′₂, an Fd, an Fd′, a single chain Fv (scFv), an scFvₐ, and a domain antibody (dAb).

[0043] In one embodiment, the antibody, or antigen-binding portion thereof, of the invention is human.

[0044] The invention also provides a pharmaceutical composition comprising the antibody, or antigen-binding portion thereof, of the invention, and a pharmaceutically acceptable carrier.

[0045] In one embodiment, the pharmaceutical composition of the invention further comprises at least one additional therapeutic agent for treating a disorder in which IL-1α/IL-1β activity is detrimental.

[0046] The invention also provides a method for inhibiting human IL-1α/IL-1β activity comprising contacting human IL-1α and IL-1β with the antibody, or antigen-binding portion thereof, of the invention such that human IL-1α/IL-1β activity is inhibited.

[0047] The invention includes a method for inhibiting human IL-1α/IL-1β activity in a human subject suffering from a disorder in which IL-1α/IL-1β activity is detrimental, comprising administering to the human subject the antibody, or antigen-binding portion thereof, of the invention such that human IL-1α/IL-1β activity in the human subject is inhibited.

[0048] In one embodiment, the disorder in which IL-1α/IL-1β activity is detrimental is selected from the group consisting of an autoimmune disease, an intestinal disorder, a skin disorder, a neurological disorder, and a metabolic disorder.

[0049] In one embodiment, the disorder in which IL-1α/IL-1β activity is detrimental is selected from the group consisting of rheumatoid arthritis, Crohn's disease, multiple sclerosis, insulin dependent diabetes, mellitus, and psoriasis.

[0050] In one embodiment, the antibody, or antigen binding portion thereof, of the invention is administered to the subject with an additional therapeutic agent.

[0051] The invention describes a single domain antibody (dAb) comprising an amino acid sequence selected from the group consisting of SEQ ID NO: 4, SEQ ID NO: 8, SEQ ID NO: 12, SEQ ID NO: 16, SEQ ID NO: 20, SEQ ID NO: 24, SEQ ID NO: 28, SEQ ID NO: 32, SEQ ID NO: 36, SEQ ID NO: 40, SEQ ID NO: 44, SEQ ID NO: 48, SEQ ID NO: 52, SEQ ID NO: 53, SEQ ID NO: 54, SEQ ID NO: 55, SEQ ID NO: 56, SEQ ID NO: 57, SEQ ID NO: 58, SEQ ID NO: 59, SEQ ID NO: 60, SEQ ID NO: 61, SEQ ID NO: 62, SEQ ID NO: 63 SEQ ID NO: 64, SEQ ID NO: 65, SEQ ID NO: 66, SEQ ID NO: 67, SEQ ID NO: 68, SEQ ID NO: 69, SEQ ID NO: 70, SEQ ID NO: 71, SEQ ID NO: 72, SEQ ID NO: 73, SEQ ID NO: 74, SEQ ID NO: 75, SEQ ID NO: 76, SEQ ID NO: 77, SEQ ID NO: 78, SEQ ID NO: 79, SEQ ID NO: 80, SEQ ID NO: 81, SEQ ID NO: 82, SEQ ID NO: 83, SEQ ID NO: 84, SEQ ID NO: 85, SEQ ID NO: 86, SEQ ID NO: 87, SEQ ID NO: 88, SEQ ID NO: 89, SEQ ID NO: 90, SEQ ID NO: 91, SEQ ID NO: 92, SEQ ID NO: 93, SEQ ID NO: 94, SEQ ID NO: 95, SEQ ID NO: 96, SEQ ID NO: 97, SEQ ID NO: 98, SEQ ID NO: 99, SEQ ID NO:100, SEQ ID NO: 101, SEQ ID NO: 102, SEQ ID NO: 103, SEQ ID NO: 104, SEQ ID NO: 105, SEQ ID NO: 106, SEQ ID NO: 107, SEQ ID NO: 108, SEQ ID NO: 109, SEQ ID NO: 110, SEQ ID NO: 111, SEQ ID NO: 112, SEQ ID NO: 113, SEQ ID NO: 114, SEQ ID NO: 115, SEQ ID NO: 116, SEQ ID NO: 117, SEQ ID NO: 118, SEQ ID NO: 119, SEQ ID NO: 120, SEQ ID NO: 121, SEQ ID NO: 122, SEQ ID NO: 123, SEQ ID NO: 124, SEQ ID NO: 125, SEQ ID NO: 126, SEQ ID NO: 127, SEQ ID NO: 128, SEQ ID NO: 129, SEQ ID NO:130, SEQ ID NO: 131, SEQ ID NO: 132, and SEQ ID NO: 133.

[0052] The invention also describes an isolated nucleic acid encoding a light chain CDR3 domain selected from the group consisting of SEQ ID NO: 11, SEQ ID NO: 23, and SEQ ID NO: 27. In one embodiment, the nucleic acid of the invention encodes an antibody light chain variable region. In one embodiment, the isolated nucleic acid of the invention comprises a CDR2 domain of the light chain variable region comprises the amino acid sequence selected from the group consisting of SEQ ID NO: 10, SEQ ID NO: 22, and SEQ ID NO: 26. In one embodiment, the isolated nucleic acid of the invention comprises the CDR1 domain of the light chain variable region comprises the amino acid sequence selected from the group consisting of SEQ ID NO: 9, SEQ ID NO: 21, and SEQ ID NO: 25.

[0053] The invention also describes an isolated nucleic acid encoding encoding a heavy chain CDR3 domain selected from the group consisting of SEQ ID NO: 3, SEQ ID NO: 7, SEQ ID NO: 15, and SEQ ID NO: 19. In one embodiment, the nucleic acid encodes an antibody heavy chain variable region. In one embodiment, the CDR2 domain of the heavy chain variable region comprises the amino acid sequence selected from the group consisting of SEQ ID NO: 2, SEQ ID NO: 6, SEQ ID NO: 14, and SEQ ID NO: 18. In one embodiment, the CDR1 domain of the heavy chain variable region comprises the amino acid sequence selected from the group consisting of SEQ ID NO: 1, SEQ ID NO: 5, SEQ ID NO: 13, and SEQ ID NO: 17.

[0054] The invention also provides an isolated nucleic acid encoding a light chain CDR3 domain selected from the group consisting of SEQ ID NO: 35, SEQ ID NO: 39, and SEQ ID NO: 47. In one embodiment, the nucleic acid encodes an antibody light chain variable region. In one embodiment, the CDR2 domain of the light chain variable region comprises the amino acid sequence selected from the group consisting of SEQ ID NO: 34, SEQ ID NO: 38, and SEQ ID NO: 46. In one embodiment, the CDR1 domain of the light chain variable region comprises the amino acid sequence selected from the group consisting of SEQ ID NO: 33, SEQ ID NO: 37, and SEQ ID NO: 45.

[0055] The invention provides an isolated nucleic acid encoding a heavy chain CDR3 domain selected from the group consisting of SEQ ID NO: 31, SEQ ID NO: 43, and SEQ ID NO: 51. In one embodiment, the nucleic acid encodes an antibody heavy chain variable region. In one embodiment, the CDR2 domain of the heavy chain variable region comprises the amino acid sequence selected from the group consisting of SEQ ID NO: 30, SEQ ID NO: 42, and SEQ ID NO: 50. In one embodiment, the CDR1 domain of the heavy chain variable region comprises the amino acid sequence selected from the group consisting of SEQ ID NO: 29, SEQ ID NO: 41, and SEQ ID NO: 49.

[0056] The invention describes an isolated nucleic acid encoding a CDR3 domain comprising an amino acid sequence selected from the group consisting of SEQ ID NO: 3, SEQ ID NO 7, SEQ ID NO: 11, SEQ ID NO: 15, SEQ ID NO: 19, SEQ ID NO: 23, SEQ ID NO: 27, SEQ ID NO: 31, SEQ ID NO: 35, SEQ ID NO: 39, SEQ ID NO: 43, SEQ ID NO: 47, and SEQ ID NO: 51.

[0057] The invention also provides an isolated nucleic acid encoding an antibody light chain variable region comprising the amino acid sequence selected from the group consisting of SEQ ID NO: 12, SEQ ID NO: 24, SEQ ID NO: 28, SEQ ID NO: 36, SEQ ID NO: 40, and SEQ ID NO: 48. In one embodiment, the nucleic acid encodes the antibody light chain variable region and an antibody light chain constant region

[0058] The invention also provides an isolated nucleic acid encoding an antibody heavy chain variable region comprising the amino acid sequence selected from the group consisting of SEQ ID NO: 4, SEQ ID NO 8, SEQ ID NO: 16, SEQ ID NO: 20, SEQ ID NO: 32, SEQ ID NO: 44, and SEQ ID NO: 52. In one embodiment, the nucleic acid encodes the antibody heavy chain variable region and an antibody heavy chain constant region.

[0059] The invention also provides a recombinant expression vector encoding an antibody light chain having a variable region comprising an amino acid sequence selected from the group consisting of SEQ ID NO: 12, SEQ ID NO: 24, and SEQ ID NO: 28; and an antibody heavy chain having a variable region comprising an amino acid sequence selected from the group consisting of SEQ ID NO: 32, SEQ ID NO: 44, and SEQ ID NO: 52.

[0060] The invention also provides a recombinant expression vector encoding an antibody heavy chain having a variable region comprising an amino acid sequence selected from the group consisting of SEQ ID NO: 4, SEQ ID NO: 8, and SEQ ID NO: 16; and an antibody light chain having a variable region comprising an amino acid sequence selected from the group consisting of SEQ ID NO: 36, SEQ ID NO: 40, and SEQ ID NO: 48.

[0061] The nucleic acid and amino acid sequences described herein are also included in the invention. In one embodiment, sequences which are at least 80%, 85%, 90%, 95%, 98%, or 99% identical to those described herein are included in invention. In one embodiment, the invention provides an isolated nucleic acid encoding an antibody light chain variable region comprising the amino acid sequence selected from the group consisting of SEQ ID NO: 12, SEQ ID NO: 24, SEQ ID NO: 28, SEQ ID NO: 36, SEQ ID NO: 40, SEQ ID NO: 48, SEQ ID NO: 94, SEQ ID NO: 95, SEQ ID NO: 96, SEQ ID NO: 97, SEQ ID NO: 98, SEQ ID NO: 99, SEQ ID NO:100, SEQ ID NO: 101, SEQ ID NO: 102, SEQ ID NO: 103, SEQ ID NO: 104, SEQ ID NO: 105, SEQ ID NO: 106, SEQ ID NO: 107, SEQ ID NO: 108, SEQ ID NO: 109, SEQ ID NO: 110, SEQ ID NO:111, SEQ ID NO:112, SEQ ID NO: 113, SEQ ID NO: 114, SEQ ID NO: 115, SEQ ID NO: 116, SEQ ID NO: 117, SEQ ID NO: 118, SEQ ID NO: 119, SEQ ID NO: 120, SEQ ID NO: 121, SEQ ID NO: 122, SEQ ID NO: 123, SEQ ID NO: 124, SEQ ID NO: 125, SEQ ID NO: 126, SEQ ID NO: 127, SEQ ID NO: 128, SEQ ID NO: 129, SEQ ID NO:130, SEQ ID NO: 131, SEQ ID NO: 132, and SEQ ID NO: 133. In one embodiment, the invention provides an isolated nucleic acid encoding an antibody heavy chain variable region comprising the amino acid sequence selected from the group consisting of SEQ ID NO: 4, SEQ ID NO 8, SEQ ID NO: 16, SEQ ID NO: 20, SEQ ID NO: 32, SEQ ID NO: 44, SEQ ID NO: 52, SEQ ID NO: 54, SEQ ID NO: 55, SEQ ID NO: 56, SEQ ID NO: 57, SEQ ID NO: 58, SEQ ID NO: 59, SEQ ID NO: 60, SEQ ID NO: 61, SEQ ID NO: 62, SEQ ID NO: 63 SEQ ID NO: 64, SEQ ID NO: 65, SEQ ID NO: 66, SEQ ID NO: 67, SEQ ID NO: 68, SEQ ID NO: 69, SEQ ID NO: 70, SEQ ID NO: 71, SEQ ID NO: 72, SEQ ID NO: 73, SEQ ID NO: 74, SEQ ID NO: 75, SEQ ID NO: 76, SEQ ID NO: 77, SEQ ID NO: 78, SEQ ID NO: 79, SEQ ID NO: 80, SEQ ID NO: 81, SEQ ID NO: 82, SEQ ID NO: 83, SEQ ID NO: 84, SEQ ID NO: 85, SEQ ID NO: 86, SEQ ID NO: 87, SEQ ID NO: 88, SEQ ID NO: 89, SEQ ID NO: 90, SEQ ID NO: 91, and SEQ ID NO: 92. Also included in the invention are nucleic acids set forth in SEQ ID NO: 134 to 843. Polypeptides encoded by the nucleic acids of SEQ ID NOs: 134 to 843 are also included in the invention.

[0062] The invention provides a recombinant expression vector comprising a stuffer sequence and a nucleic acid sequence encoding a heavy or light chain constant region. In one embodiment, the gene of interest is an antibody heavy or light chain variable region. Such vectors may be used to express full length heavy or light chains of an antibody, by cloning a heavy or light chain variable sequence into the insertion site of the vector, which is operably linked to a constant region. In another embodiment, the vector comprises an antibody heavy chain constant region is murine or human, e.g., murine or human lambda, human kappa human IgG3, IgA, IgE, IgM, murine IgG2b, murine IgG3, and an Fc domain. In a further embodiment, the antibody heavy constant region further comprises an alanine mutation at position 234, 235, 237, or any combination thereof. IN still another embodiment, the antibody light chain constant region is either a human kappa isotype or a human lambda isotype. In still another ambodiment, the antibody heavy constant region is selected from the group consisting of gamma1, z, a; gamma1, z, non-a; gamma2, n+; gamma2, n−; and gamma 4.

[0063] In one embodiment, the vector of the invention may be used to express a fusion protein, e.g., an Fc fusion protein.

[0064] The invention also provides an expression vector comprising an episomal origin of replication; an insertion site for inserting a nucleic acid sequence encoding a gene of interest; a stuffer sequence at the insertion site; and a nucleic acid encoding an antibody heavy or light chain constant region. In one embodiment, the stuffer sequence comprises the restriction enzyme sites NruI, FspAI, or a combination thereof at the 5′ end of the stuffer sequence. In another embodiment, the stuffer sequence comprises the restriction enzyme sites AfeI, SnaBI, BsiWI, HpaI, SalI, or a combination thereof at the 3′ end of the stuffer sequence. In one embodiment, the stuffer sequence comprises a nucleic acid sequence having at least 80%, 90%, 95%, 98%, or 99% identity to the sequence set forth at nucleotides 124 to 1100 of SEQ ID NO: 844.

[0065] The vector of the invention may also include certain features desirable for protein expression. For example, the vector may includes an episomal origin of replication is an SV40 origin of replication. In one embodiment, the vector comprises a promoter operably linked to the insertion site, wherein the promoter is an EF-1α promoter.

[0066] In one embodiment, the invention provides a nucleic acid comprising the recombinant expression vector, e.g., SEQ ID NOs: 844 to 855. Sequences having 80%, 85%, 90%, 95%, 99% identity to the sequences described in SEQ ID NO: 844, SEQ ID NO: 845, SEQ ID NO: 846, SEQ ID NO: 847, SEQ ID NO: 848, SEQ ID NO: 849, SEQ ID NO: 850, SEQ ID NO: 851, SEQ ID NO: 852, SEQ ID NO: 853, SEQ ID NO: 854, and SEQ ID NO: 855 are also included in the invention. The invention also provides a pEF-BOS recombinant expression vector comprising a stuffer sequence which is inbetween an upstream signal sequence and a downstream Ig constant region sequence.

[0067] The invention also includes a host cell into which the recombinant expression vector of the invention has been introduced.

[0068] The invention further provides a method of synthesizing a human antibody that binds human IL-1α and IL-1β comprising culturing the host cell of the invention in a culture medium until a human antibody that binds human IL-1α and IL-1β is synthesized by the cell.

### BRIEF DESCRIPTION OF THE DRAWINGS

[0069] FIG. 1 shows a schematic of a plasmid map of pYDs-TEV-2-108/1-122.

[0070] FIG. 2 shows the sequence randomization of HCDRs in the 30 small libraries.

[0071] FIG. 3 shows a schematic and sequences used for CDR recombination of clone 2-108. Bold amino acids highlight differences between clone 2-108 and the affinity matured clones.

[0072] FIG. 4 shows K_{D} on yeast surface of single CDR affinity matured and parental 2-108 clones.

[0073] FIG. 5 shows IL-1β neutralization potency of single CDR affinity matured vs parental 2-108 clones as IgG.

[0074] FIG. 6 shows K_{D} on yeast surface of CDR recombination vs. single CDR affinity matured 2-108 clones.

[0075] FIG. 7 shows a plasmid map (7A) and schematic representation of Fab expression on yeast surfaces (7B).

[0076] FIGS. 8A and 8B show Fab library sorting for ABT2-108 affinity maturation.

[0077] FIG. 9 shows analysis of 2-108 clones on yeast surface.

[0078] FIG. 10 shows sorting results for ABT 2-122 affinity maturation.

[0079] FIG. 11 shows the plasmid map of pYDs-TEV-2-108-538x/1-95-15.

[0080] FIG. 12 provides a diagram of the yeast CDR spiking libraries construction.

[0081] FIG. 13 shows ABT-95-15 CDR recombination library construction.

[0082] FIG. 14 provides results of shows K_{D} analysis of ABT2-108-538x/ABT1-95-15 scFv on yeast surface.

[0083] FIG. 15 provides off-rate analysis if the single CDR mutants on yeast surface.

[0084] FIG. 16 describe an on rate and off rate analysis of affinity-matured ABT1-95-15 clones on yeast surface.

[0085] FIG. 17 describes an analysis of affinity-matured ABT1-95-15 clones on yeast surface.

[0086] FIGS. 18A and 18B show the design and use of mouse and human pBOS templates, respectively.

[0087] FIG. 19 describes a representative plasmid map of an scFv fusion construct (pBOS-1-98/2-108-538x-scFc).

[0088] FIG. 20 shows combined MRC5 neutralisation data for IL-1α and IL-1β of the ABT1-95-A2 and ABT2-65-166 dAb molecules and the IgG resulting from the combination of these two dAb variable domains.

[0089] FIGS. 21A to 21D show sequences of ABT1-95, ABT1-122, ABT1-141, and ABT2-65, respectively, clones as maturation has progressed.

[0090] FIG. 22 shows simultaneous binding of rhIL-1 alpha followed by rhIL-1 beta to ABT 108-620x/ABT1-95-A3- showing non interfering independent binding

[0091] FIG. 23 shows IL-6 inhibition using an in vivo study to determine the efficacy of a dual specific antibody for inhabiting IL-1α and IL-1β activity. Key for figure reads top of key to left of figure, e.g., hIgG (250 μg) coincides to days 7, 4, and 1 beginning at left of x axis.

### DETAILED DESCRIPTION OF THE INVENTION

### I. Definitions

[0092] In order that the present invention may be more readily understood, certain terms are first defined.

[0093] The term “IL-1” as used herein refers to interleukin-1. The term “IL-1” is intended to include both IL-1α and IL-1β.

[0094] The term “antibody” as referred to herein includes whole antibodies and any antigen binding fragment (i.e., “antigen-binding portion”) or single chains thereof. An “antibody” refers to a glycoprotein comprising at least two heavy (H) chains and two light (L) chains inter-connected by disulfide bonds, or an antigen binding portion thereof. Each heavy chain is comprised of a heavy chain variable region (abbreviated herein as V_{H}) and a heavy chain constant region. The heavy chain constant region is comprised of three domains, CH1, CH2 and CH3. Each light chain is comprised of a light chain variable region (abbreviated herein as V_{L}) and a light chain constant region. The light chain constant region is comprised of one domain, CL. The V_{H} and V_{L} regions can be further subdivided into regions of hypervariability, termed complementarity determining regions (CDR), interspersed with regions that are more conserved, termed framework regions (FR). Each V_{H} and V_{L} is composed of three CDRs and four FRs, arranged from amino-terminus to carboxy-terminus in the following order: FR1, CDR1, FR2, CDR2, FR3, CDR3, FR4. The variable regions of the heavy and light chains contain a binding domain that interacts with an antigen. The constant regions of the antibodies may mediate the binding of the immunoglobulin to host tissues or factors, including various cells of the immune system (e.g., effector cells) and the first component (Clq) of the classical complement system.

[0095] The term “antigen-binding portion” of an antibody (or simply “antibody portion”), as used herein, refers to one or more fragments of an antibody that retain the ability to specifically bind to an antigen (e.g., IL-1α, IL-1β). It has been shown that the antigen-binding function of an antibody can be performed by fragments of a full-length antibody. Examples of binding fragments encompassed within the term “antigen-binding portion” of an antibody include (i) a Fab fragment, a monovalent fragment consisting of the V_{L}, V_{H}, CL and CH1 domains; (ii) a F(ab′)₂ fragment, a bivalent fragment comprising two Fab fragments linked by a disulfide bridge at the hinge region; (iii) a Fd fragment consisting of the V_{H} and CH1 domains; (iv) a Fv fragment consisting of the V_{L} and V_{H} domains of a single arm of an antibody, (v) a dAb fragment (Ward et al., (1989) Nature 341:544-546), which consists of a V_{H} or V_{L} domain; and (vi) an isolated complementarity determining region (CDR). Furthermore, although the two domains of the Fv fragment, VL and V_{H}, are coded for by separate genes, they can be joined, using recombinant methods, by a synthetic linker that enables them to be made as a single protein chain in which the VL and VH regions pair to form monovalent molecules (known as single chain Fv (scFv); see e.g., Bird et al. (1988) Science 242:423-426; and Huston et al. (1988) Proc. Natl. Acad. Sci. USA 85:5879-5883). Such single chain antibodies are also intended to be encompassed within the term “antigen-binding portion” of an antibody. These antibody fragments are obtained using conventional techniques known to those with skill in the art, and the fragments are screened for utility in the same manner as are intact antibodies. In one embodiment if the invention, the antibody fragment is selected from the group consisting of a Fab, an Fd, an Fd′, a single chain Fv (scFv), an scFvₐ, and a domain antibody (dAb).

[0096] Still further, an antibody or antigen-binding portion thereof may be part of a larger immunoadhesion molecules, formed by covalent or noncovalent association of the antibody or antibody portion with one or more other proteins or peptides. Examples of such immunoadhesion molecules include use of the streptavidin core region to make a tetrameric scFv molecule (Kipriyanov et al. (1995) Human Antibodies and Hybridomas 6:93-101) and use of a cysteine residue, a marker peptide and a C-terminal polyhistidine tag to make bivalent and biotinylated scFv molecules (Kipriyanov et al. (1994) Mol. Immunol. 31:1047-1058). Antibody portions, such as Fab and F(ab′)₂ fragments, can be prepared from whole antibodies using conventional techniques, such as papain or pepsin digestion, respectively, of whole antibodies. Moreover, antibodies, antibody portions and immunoadhesion molecules can be obtained using standard recombinant DNA techniques.

[0097] Two antibody domains are “complementary” where they belong to families of structures which form cognate pairs or groups or are derived from such families and retain this feature. For example, a VH domain and a VL domain of an antibody are complementary; two VH domains are not complementary, and two VL domains are not complementary. Complementary domains may be found in other members of the immunoglobulin superfamily, such as the Vα and Vβ (or gamma and delta) domains of the T-cell receptor

[0098] The term “domain” refers to a folded protein structure which retains its tertiary structure independently of the rest of the protein. Generally, domains are responsible for discrete functional properties of proteins, and in many cases may be added, removed or transferred to other proteins without loss of function of the remainder of the protein and/or of the domain. By single antibody variable domain is meant a folded polypeptide domain comprising sequences characteristic of antibody variable domains. It therefore includes complete antibody variable domains and modified variable domains, for example in which one or more loops have been replaced by sequences which are not characteristic of antibody variable domains, or antibody variable domains which have been truncated or comprise N- or C-terminal extensions, as well as folded fragments of variable domains which retain at least in part the binding activity and specificity of the full-length domain.

[0099] Variable domains of the invention may be combined to form a group of domains; for example, complementary domains may be combined, such as VL domains being combined with VH domains. Non-complementary domains may also be combined. Domains may be combined in a number of ways, involving linkage of the domains by covalent or non-covalent means.

[0100] A “dAb” or “domain antibody” refers to a single antibody variable domain (V_{H} or V_{L}) polypeptide that specifically binds antigen.

[0101] An “isolated dual-specific antibody”, or an “isolated antibody,” as used herein, is intended to refer to an antibody that is substantially free of other antibodies having different antigenic specificities (e.g., an isolated antibody that specifically binds IL-1α/IL-1β that is substantially free of antibodies that specifically bind antigens other than IL-1α). Moreover, an isolated antibody may be substantially free of other cellular material and/or chemicals.

[0102] As referred to herein, the terms “dual-specific antibody” or “an antibody having dual-specificity” means an antibody comprising two antigen-binding sites or regions, a first binding site or region having affinity for a first antigen or epitope and a second binding site or region having binding affinity for a second antigen or epitope that is distinct from the first. In one embodiment, the heavy chain variable domain comprises one antigen binding region, i.e., IL-1α or IL-1β, and the light chain variable domain comprises a further antigen binding region, i.e., IL-1α or IL-1β, such that the antibody has dual-epitope specificity for IL-1α and IL-1β. In addition, the invention also includes within its scope dual-specific V_{H}/V_{L} combinations and V_{L}/V_{L} combinations.

[0103] As used herein, the term “antigen binding region” or “antigen binding site” refers to the portion(s) of an antibody molecule, or antigen binding portion thereof, which contains the amino acid residues that interact with an antigen and confers on the antibody its specificity and affinity for the antigen. In one embodiment, the antibody of the invention comprises two antigen binding regions, one which is specific for IL-1α and another which is specific for IL-1β.

[0104] The term “epitope” is meant to refer to that portion of any molecule capable of being recognized by and bound by an antibody at one or more of the antibody's antigen binding regions. In the context of the present invention, first and second “epitopes” are understood to be epitopes which are not the same and are not bound by a single monospecific antibody, or antigen-binding portion thereof. In the invention, the first and second epitopes are advantageously on different antigens, IL-1α or IL-1β. Likewise, the first and second antigens are advantageously not the same.

[0105] A “neutralizing antibody,” as used herein, is intended to refer to an antibody whose binding to a particular antigen(s), i.e., IL-1α or IL-1β, results in inhibition of the biological activity of the antigen. Inhibition of the biological activity of IL-1α or IL-1β can be assessed by measuring one or more indicators of IL-1α or IL-1β activity, such as IL-1α or IL-1β-induced cytotoxicity (either in vitro or in vivo), or IL-1α or IL-1β binding to IL-1α or IL-1β receptors. These indicators of IL-1α/IL-1β activity can be assessed by one or more standard in vitro or in vivo assays known in the art (for example see Example 5). In one embodiment, the ability of a dual-specific antibody to neutralize both IL-1α and IL-1β activity is assessed by inhibition of IL-1α and IL-1β in human embryonic lung fibroblasts, MRC-5 cells.

[0106] The “ND₅₀” value of an antibody, or antigen-binding portion thereof, refers to the concentration of antibody resulting in a one-half maximal inhibition of the given cytokine activity on a responsive cell line.

[0107] As used herein, the term “EC50” is defined as the concentration of an antibody, or antigen-binding portion thereof, that results in 50% of a measured biological effect. For example, the EC50 of a therapeutic agent having a measurable biological effect may comprise the value at which the agent displays 50% of the biological effect. The term “IC50” is defined as the concentration of an antibody, or antigen-binding portion thereof, that results in 50% inhibition of a measured effect.

[0108] The term “surface plasmon resonance”, as used herein, refers to an optical phenomenon that allows for the analysis of real-time biospecific interactions by detection of alterations in protein concentrations within a biosensor matrix, for example using the BIAcore system (Pharmacia Biosensor AB, Uppsala, Sweden and Piscataway, N.J.). For further descriptions, see Jonsson et al. (1993) Ann. Biol. Clin. 51:19-26; Jonsson et al. (1991) Biotechniques 11:620-627; Johnsson et al. (1995) J. Mol. Recognit. 8: 125-131; and Johnnson et al. (1991) Anal. Biochem. 198:268-277.

[0109] The term “K_{off}”, as used herein, is intended to refer to the off rate constant for dissociation of an antibody from the antibody/antigen complex.

[0110] The term “K_{d}” or “K_{D}” as used herein, is intended to refer to the dissociation constant of a particular antibody-antigen interaction, which is obtained from the ratio of k_{d} to kₐ (i.e., k_{d}/kₐ) and is expressed as a molar concentration (M). K_{D} values for antibodies can be determined using methods well established in the art. A preferred method for determining the K_{D} of an antibody is by using surface plasmon resonance, preferably using a biosensor system such as a Biacore™ system.

[0111] A “monoclonal antibody” as used herein is intended to refer to an antibody obtained from a population of substantially homogeneous antibodies, i.e., the individual antibodies comprising the population are identical except for possible naturally occurring mutations that may be present in minor amounts. Monoclonal antibodies are highly specific. Furthermore, in contrast to polyclonal antibody preparations that typically include different antibodies directed against different determinants (epitopes), each monoclonal antibody is directed against a single determinant on the antigen. The modifier “monoclonal” is not to be construed as requiring production of the antibody by any particular method.

[0112] The phrase “recombinant antibody” refers to antibodies that are prepared, expressed, created or isolated by recombinant means, such as antibodies expressed using a recombinant expression vector transfected into a host cell, antibodies isolated from a recombinant, combinatorial antibody library, antibodies isolated from an animal (e.g., a mouse) that is transgenic for human immunoglobulin genes (see e.g., Taylor et al. (1992) Nucl. Acids Res. 20:6287-6295) or antibodies prepared, expressed, created or isolated by any other means that involves splicing of particular immunoglobulin gene sequences (such as human immunoglobulin gene sequences) to other DNA sequences. Examples of recombinant antibodies include chimeric, CDR-grafted and humanized antibodies.

[0113] The term “human antibody” refers to antibodies having variable and constant regions corresponding to, or derived from, human germline immunoglobulin sequences as described by, for example, Kabat et al. (See Kabat, et al. (1991) Sequences of Proteins of Immunological Interest, Fifth Edition, U.S. Department of Health and Human Services, NIH Publication No. 91-3242). The human antibodies of the invention, however, may include amino acid residues not encoded by human germline immunoglobulin sequences (e.g., mutations introduced by random or site-specific mutagenesis in vitro or by somatic mutation in vivo), for example in the CDRs and in particular CDR3.

[0114] Recombinant human antibodies of the invention have variable regions, and may also include constant regions, derived from human germline immunoglobulin sequences (See Kabat et al. (1991) Sequences of Proteins of Immunological Interest, Fifth Edition, U.S. Department of Health and Human Services, NIH Publication No. 91-3242). In certain embodiments, however, such recombinant human antibodies are subjected to in vitro mutagenesis (or, when an animal transgenic for human Ig sequences is used, in vivo somatic mutagenesis) and thus the amino acid sequences of the VH and VL regions of the recombinant antibodies are sequences that, while derived from and related to human germline VH and VL sequences, may not naturally exist within the human antibody germline repertoire in vivo. In certain embodiments, however, such recombinant antibodies are the result of selective mutagenesis or backmutation or both.

[0115] The term “backmutation” refers to a process in which some or all of the somatically mutated amino acids of a human antibody are replaced with the corresponding germline residues from a homologous germline antibody sequence. The heavy and light chain sequences of a human antibody of the invention are aligned separately with the germline sequences in the VBASE database to identify the sequences with the highest homology. Differences in the human antibody of the invention are returned to the germline sequence by mutating defined nucleotide positions encoding such different amino acid. The role of each amino acid thus identified as candidate for backmutation should be investigated for a direct or indirect role in antigen binding and any amino acid found after mutation to affect any desirable characteristic of the human antibody should not be included in the final human antibody. To minimize the number of amino acids subject to backmutation those amino acid positions found to be different from the closest germline sequence but identical to the corresponding amino acid in a second germline sequence can remain, provided that the second germline sequence is identical and colinear to the sequence of the human antibody of the invention for at least 10, preferably 12 amino acids, on both sides of the amino acid in question. Backmutation may occur at any stage of antibody optimization.

[0116] The term “chimeric antibody” refers to antibodies which comprise heavy and light chain variable region sequences from one species and constant region sequences from another species, such as antibodies having murine heavy and light chain variable regions linked to human constant regions.

[0117] The term “CDR-grafted antibody” refers to antibodies which comprise heavy and light chain variable region sequences from one species but in which the sequences of one or more of the CDR regions of VH and/or VL are replaced with CDR sequences of another species, such as antibodies having murine heavy and light chain variable regions in which one or more of the murine CDRs (e.g., CDR3) has been replaced with human CDR sequences.

[0118] The term “humanized antibody” refers to antibodies which comprise heavy and light chain variable region sequences from a non-human species (e.g., a mouse) but in which at least a portion of the VH and/or VL sequence has been altered to be more “human-like”, i.e., more similar to human germline variable sequences. One type of humanized antibody is a CDR-grafted antibody, in which human CDR sequences are introduced into non-human VH and VL sequences to replace the corresponding nonhuman CDR sequences.

[0119] The term “nucleic acid molecule”, as used herein, is intended to include DNA molecules and RNA molecules. A nucleic acid molecule may be single-stranded or double-stranded, but preferably is double-stranded DNA.

[0120] The term “isolated nucleic acid molecule”, as used herein in reference to nucleic acids encoding antibodies or antibody portions (e.g., VH, VL, CDR3) that bind IL-1α and IL-1β, is intended to refer to a nucleic acid molecule in which the nucleotide sequences encoding the antibody or antibody portion are free of other nucleotide sequences encoding antibodies or antibody portions that bind antigens other than hTNFα, which other sequences may naturally flank the nucleic acid in human genomic DNA. Thus, for example, an isolated nucleic acid of the invention encoding a VH region of an anti-TNFα antibody contains no other sequences encoding other VH regions that bind antigens other than IL-1α and IL-1β.

[0121] The term “vector”, as used herein, is intended to refer to a nucleic acid molecule capable of transporting another nucleic acid to which it has been linked. One type of vector is a “plasmid”, which refers to a circular double stranded DNA loop into which additional DNA segments may be ligated. Another type of vector is a viral vector, wherein additional DNA segments may be ligated into the viral genome. Certain vectors are capable of autonomous replication in a host cell into which they are introduced (e.g., vectors may have a bacterial origin of replication and/or an episomal origin of replication (generally derived from a viral sequence, e.g., SV40). Other vectors (e.g., non-episomal mammalian vectors) can be integrated into the genome of a host cell upon introduction into the host cell, and thereby are replicated along with the host genome. Moreover, certain vectors are capable of directing the expression of genes to which they are operatively linked. Such vectors are referred to herein as “recombinant expression vectors” (or simply, “expression vectors”). In general, expression vectors of utility in recombinant DNA techniques are often in the form of plasmids. In the present specification, “plasmid” and “vector” may be used interchangeably as the plasmid is the most commonly used form of vector. However, the invention is intended to include such other forms of expression vectors, such as viral vectors (e.g., replication defective retroviruses, adenoviruses and adeno-associated viruses), which serve equivalent functions.

[0122] As used herein, the term “episomally replicating vector” or “episomal vector” refers to a vector which is typically and very preferably not integrated into the genome of the host cell, but exists in parallel. An episomally replicating vector, as used herein, is replicated during the cell cycle and in the course of this replication the vector copies are distributed statistically in the resulting cells depending on the number of the copies present before and after cell division. Preferably, the episomally replicating vector may take place in the nucleus of the host cell, and preferably replicates during S-phase of the cell cycle. Moreover, the episomally replicating vector is replicated at least once, i.e. one or multiple times, in the nucleus of the host cell during S-phase of the cell cycle. In a very preferred embodiment, the episomally replicating vector is replicated once in the nucleus of the host cell during S-phase of the cell cycle.

[0123] As used herein, the terms “origin of replication sequences” or “origin of replication,” used interchangeably herein, refer to sequences which, when present in a vector, initiate replication. An origin of replication may be recognized by a replication initiation factor or, alternatively, by a DNA helicase.

[0124] The “gene of interest” as used herein, refers to an exogenous DNA sequence which is added to the vector of the invention. The gene of interest, for example, may comprise a coding sequence which can be either spaced by introns or which is a cDNA encoding the open reading frame. The region of the vector to which the gene of interest is cloned is referred to herein as an “insertion site.” Preferably, the gene of interest comprises a portion of the antibody or fusion protein that is expressed using a vector of the invention. For example, the heavy chain variable region of the antibody ABT2-108, i.e., the gene of interest, may cloned into the vector of the invention which comprises a heavy chain constant region

[0125] In one embodiment of the invention, the vector comprises an antibody light or heavy chain constant region which is 3′ to the insertion site for the gene of interest and is operably linked thereto. Thus, in one embodiment, the gene of interest is a variable region of a light or heavy chain of an antibody which is operably linked to the antibody light or heavy chain constant region encoded in the vector of the invention.

[0126] The term “promoter” includes any nucleic acid sequence sufficient to direct transcription in a eukaryotic cell, including inducible promoters, repressible promoters and constitutive promoters. Typically a promoter includes elements that are sufficient to render promoter-dependent gene expression controllable in a cell type-specific, tissue-specific or temporal-specific manner, or inducible by external signals or agents. Such elements can be located in the 5′ or 3′ or intron sequence regions of a particular gene. Ordinarily, gene expression will be constitutive, although regulatable promoters can be employed in the present invention if desired. Gene expression can also be controlled by transcription-regulation using heat, light, or metals, such as by the use of metallothionine genes or heat shock genes.

[0127] “Upstream” and “downstream” are terms used to describe the relative orientation between two elements present in a nucleotide sequence or vector. An element that is “upstream” of another is located in a position closer to the 5′ end of the sequence (i.e., closer to the end of the molecule that has a phosphate group attached to the 5′ carbon of the ribose or deoxyribose backbone if the molecule is linear) than the other element. An element is said to be “downstream” when it is located in a position closer to the 3′ end of the sequence (i.e., the end of the molecule that has an hydroxyl group attached to the 3′ carbon of the ribose or deoxyribose backbone in the linear molecule) when compared to the other element.

[0128] As used herein, the term “stuffer sequence” refers to a nucleic acid sequence, preferably in a vector, which is flanked by restriction enzyme sites at both the 5′ and 3′ ends. The stuffer sequence is located in a vector at the insertion site for the nucleic acid encoding the gene of interest. During the cloning process, the stuffer sequence is digested away from the vector using the appropriate restriction enzymes, and the nucleic acid encoding the gene of interest is ligated or homologously recombined into the vector at the former position of the stuffer sequence. Preferably, the stuffer sequence is large enough to provide sufficient distance between the 5′ and 3′ restriction enzyme sites so that the restriction enzyme can efficiently cut the vector. In addition, it is preferred that the length of the stuffer sequence is different than the size of the nucleic acid encoding the gene of interest, e.g., a stuffer sequence of about 300 base pairs or less or about 400 base pairs or more may be used for a nucleic acid encoding the gene of interest which is about 350 base pairs. In another embodiment, the stuffer sequence is about 1 kb in size.

[0129] The term “recombinant host cell” (or simply “host cell”), as used herein, is intended to refer to a cell into which a recombinant expression vector has been introduced. It should be understood that such terms are intended to refer not only to the particular subject cell but to the progeny of such a cell. Because certain modifications may occur in succeeding generations due to either mutation or environmental influences, such progeny may not, in fact, be identical to the parent cell, but are still included within the scope of the term “host cell” as used herein.

[0130] The term “repertoire” refers to a collection of diverse variants, for example polypeptide variants which differ in their primary sequence. A library used in the present invention will encompass a repertoire of polypeptides comprising at least 1000 members.

[0131] The term “library” refers to a mixture of heterogeneous polypeptides or nucleic acids. The library is composed of members, each of which have a single polypeptide or nucleic acid sequence. To this extent, library is synonymous with repertoire. Sequence differences between library members are responsible for the diversity present in the library. The library may take the form of a simple mixture of polypeptides or nucleic acids, or may be in the form of organisms or cells, for example bacteria, viruses, animal or plant cells and the like, transformed with a library of nucleic acids. Preferably, each individual organism or cell contains only one or a limited number of library members. Advantageously, the nucleic acids are incorporated into expression vectors, in order to allow expression of the polypeptides encoded by the nucleic acids. In a preferred aspect, therefore, a library may take the form of a population of host organisms, each organism containing one or more copies of an expression vector containing a single member of the library in nucleic acid form which can be expressed to produce its corresponding polypeptide member. Thus, the population of host organisms has the potential to encode a large repertoire of genetically diverse polypeptide variants.

[0132] Various aspects of the invention are described in further detail in the following subsections.

### II. IL-1α/IL-1β Dual-Specific Antibodies

[0133] The invention provides isolated, dual-specific antibodies, or antigen binding portions thereof, that bind human IL-1α and IL-1β with high affinity and neutralizing capacity. In a preferred embodiment, the antibody, or antigen-binding fragment thereof, is human. Preferably, the antibodies of the invention are recombinant, neutralizing anti-IL-1α and anti-IL-1β. In one embodiment, the invention provides an isolated, dual-specific antibody, or an antigen-binding portion thereof, which dissociates from human IL-1α with a K_{D} of 1×10⁻⁷ M or less and neutralizes human IL-1α in a standard in vitro MRC5 assay with an ND₅₀ of 900 nM or less, and dissociates from human IL-1β with a K_{D} of 5×10⁻⁵ M or less, and neutralizes human IL-1β in a standard in vitro MRC5 assay with an ND₅₀ of 800 nM or less. In a preferred embodiment, the IL-1α/IL-1β dual-specific antibody, or antigen-binding portion thereof, binds human IL-1α and IL-1β (hIL-1α and hIL-1β), but does not bind mouse IL-1α or mouse IL-1β. In the case that the variable domains are selected from V-gene repertoires selected for instance using phage display technology as herein described, then these variable domains can comprise a universal framework region, such that is they may be recognised by a specific generic ligand as herein defined. The use of universal frameworks, generic ligands and the like is described in WO99/20749. In the present invention, reference to phage display includes the use of both phage and/or phagemids.

[0134] The dual-specific antibodies of the invention may comprise variable regions which are derived from antibodies directed against IL-1α and IL-1β. Alternatively, the antibodies of the invention may be derived from a repertoire of single antibody domains such as those expressed on the surface of filamentous bacteriophage. Selection may be performed as described below in section III and in the Examples provided herein.

[0135] The invention provides single domain antibodies which are have neutralizing and affinity properties specific for IL-1α or IL-1β, as summarized in Tables 8 and 61 to 64, as well as the Examples.

[0136] Dual-specific antibodies, or antigen-binding portions thereof, according to the present invention preferably comprise combinations of heavy and light chain domains. For example, the dual specific antibody, or antigen-binding portion thereof, may comprise a V_{H} domain and a V_{L} domain, which may be linked together in the form of an scFv. In addition, the antibody, or antigen-binding portion thereof, may comprise one or more C_{H} or C_{L} domains. For example, the antibody, or antigen-binding portion thereof, may comprise a C_{H}1 domain, C_{H}2 or C_{H}3 domain, and/or a C_{L} domain, Cμ1, Cμ2, Cμ3 or Cμ4 domains, or any combination thereof. A hinge region domain may also be included. Such combinations of domains may, for example, mimic natural antibodies, such as IgG or IgM, or fragments thereof, such as Fv, scFv, Fab or F(ab′)₂ molecules. Other structures, such as a single arm of an IgG molecule comprising V_{H}, V_{L}, C_{H}1 and C_{L} domains, are envisaged.

[0137] Preferably, the dual specific antibody, or antigen-binding portion thereof, of the invention comprises only two variable domains although several such antibodies, or antigen-binding portions thereof, may be incorporated together into the same protein, for example two such antibodies, or antigen-binding portions thereof, can be incorporated into an IgG or a multimeric immunoglobulin, such as IgM. Alternatively, in another embodiment a plurality of dual specific ligands are combined to form a multimer. For example, two different dual specific ligands are combined to create a tetra-specific molecule.

[0138] It will be appreciated by one skilled in the art that the light and heavy variable regions of a dual-specific antibodies, or antigen-binding portions thereof, produced according to the methods described herein and known in the art, may be on the same polypeptide chain, or alternatively, on different polypeptide chains. In the case that the variable regions are on different polypeptide chains, then they may be linked via a linker, generally a flexible linker (such as a polypeptide chain), a chemical linking group, or any other method known in the art.

[0139] In one embodiment, the present invention provides dual specific antibodies, or antigen-binding portions thereof, which comprise at least two complementary variable domains, e.g., a VH and a VL domain. In another embodiment, the present invention provides dual specific antibodies, or antigen-binding portions thereof, which comprise at least two non-complementary variable domains. For example, the antibody, or antigen-binding portion thereof, may comprise a pair of VH domains or a pair of VL domains. Advantageously, the domains are of non-camelid origin; preferably they are human domains or comprise human framework regions (FWs) and one or more heterologous CDRs. CDRs and framework regions are those regions of an immunoglobulin variable domain as defined in the Kabat database of Sequences of Proteins of Immunological Interest.

[0140] Dual-specific antibodies of the invention may include variable heavy and light chain amino acid regions described in SEQ ID NOs: 4, 8, 12, 16, 20, 24, 28, 32, 36, 40, 44, 48, and 52 (see Table 61 and Example 3 for a summary). Dula specific antibodies may also include any of the variable heavy and light chain amino acid regions described in SEQ ID NOs: 53 to 133.

[0141] Pairings of the single domain antibodies described in SEQ ID NOs: 4, 8, 12, 16, 20, 24, 28, 32, 36, 40, 44, 48, and 52, as well as any of the variable sequences described in SEQ ID NOs: 53 to 133, are also included in the invention. Examples of dual-specific IL-1α and IL-1β antibodies are described in the Examples, including Example 5 and Table 9. In one embodiment, the invention provides a dual-specific, isolated antibody, or antigen-binding portion thereof, comprising an IL-1α antigen binding region and an IL-1β antigen binding region, wherein the antibody, or antigen-binding portion thereof, comprises a heavy chain variable region and a light chain variable region combination comprising a heavy chain variable region comprising CDRs as set forth in SEQ ID NO: 16 (ABT1-96) and a light chain variable region comprising CDRs as set forth in SEQ ID NO: 40 (ABT246); a light chain variable region comprising CDRs as set forth in SEQ ID NO: 24 (ABT1-122) and a heavy chain variable region comprising CDRs as set forth in SEQ ID NO: 52 (ABT2-108); a light chain variable region comprising CDRs as set forth in SEQ ID NO: 28 (ABT1-141) and a heavy chain variable region comprising CDRs as set forth in SEQ ID NO: 52 (ABT2-108); a light chain variable region comprising CDRs as set forth in SEQ ID NO: 28 (ABT1-141) and a heavy chain variable region comprising CDRs as set forth in SEQ ID NO: 44 (ABT2-65); a heavy chain variable region comprising CDRs as set forth in SEQ ID NO: 16 (ABT1-96) and a light chain variable region comprising CDRs as set forth in SEQ ID NO: 36 (ABT242); a light chain variable region comprising CDRs as set forth in SEQ ID NO: 12 (ABT1-95) and a heavy chain variable region comprising CDRs as set forth in SEQ ID NO: 32 (ABT2-13); a light chain variable region comprising CDRs as set forth in SEQ ID NO: 24 (ABT1-122) and a heavy chain variable region comprising CDRs as set forth in SEQ ID NO: 44 (ABT2-65); or a heavy chain variable region comprising CDRs as set forth in SEQ ID NO: 20 (ABT1-98) and a light chain variable region comprising CDRs as set forth in SEQ ID NO: 48 (ABT2-76).

[0142] It is known in the art that antibody heavy and light chain CDR3 domains play an important role in the binding specificity/affinity of an antibody for an antigen. Accordingly, in another aspect, the invention pertains to antibodies, including human antibodies, that have slow dissociation kinetics for association with either IL-1α or IL-1β and that have light and heavy chain CDR3 domains that structurally are identical to or related to those identified herein, including those CDR3 domains described in SEQ ID NOs: 11, 23, 27, 3, 7, 15, and 19.

[0143] In one aspect, the invention pertains to a dual-specific antibody, or antigen-binding portion thereof, of the invention is preferably selected to have desirable binding kinetics (e.g., high affinity, low dissociation, slow off-rate, strong neutralizing activity) for IL-1α and IL-1β, to which the antibody specifically binds. For example, the dual-specific antibody, or portion thereof, may bind IL-1α and IL-1β with a k_{off} rate constant of 0.1 s⁻¹ or less, more preferably a k_{off} rate constant of 1×10⁻² s⁻¹ or less, even more preferably a k_{off} rate constant of 1×10⁻³ s⁻¹ or less, even more preferably a k_{off} rate constant of 1×10⁻⁴ s⁻¹ or less, or even more preferably a k_{off} rate constant of 1×10⁻⁵ s⁻¹ or less, as determined by surface plasmon resonance. In one embodiment, the isolated, dual-specific antibody, or an antigen-binding portion thereof, dissociates from human IL-1α with a K_{D} of about 1×10⁻⁷ M to about 1×10⁻⁸ M or less and dissociates from human IL-1β with a K_{D} of about 5×10⁻⁵ M to about 1×10⁻⁹ M or less. Ranges intermediate to the above recited constants, e.g., 4.0×10⁻⁸ M, are also intended to be part of this invention. For example, ranges of values using a combination of any of the above recited values as upper and/or lower limits are intended to be included.

[0144] In one embodiment, the antibody, or antigen-binding portion thereof, dissociates from IL-1β with a K_{D} of 5.4×10⁻⁵ M or less; dissociates from IL-1β with a K_{D} of 2.8×10⁻⁶ M or less; dissociates from IL-1β with a K_{D} of 1.3×10⁻⁶ M or less; dissociates from IL-1β with a K_{D} of 9.3×10⁻⁷ M or less; dissociates from IL-1β with a K_{D} of 2×10⁻⁷ M or less; dissociates from IL-1β with a K_{D} of 1.1×10⁻⁷ M or less; or dissociates from IL-1β with a K_{D} of 2.8×10⁻⁸ M or less. Ranges intermediate to the above recited constants, e.g., K_{D} of 1.7×10⁻⁷ M or less, are also intended to be part of this invention. For example, ranges of values using a combination of any of the above recited values as upper and/or lower limits are intended to be included.

[0145] In one embodiment, the antibody, or antigen-binding portion, dissociates from IL-1α with a K_{D} of 1×10⁻⁸ M or less; dissociates from IL-1α with a K_{D} of 1×10⁻⁹ M or less; dissociates from IL-1α with a K_{D} of 40-86 nM or less; dissociates from IL-1α with a K_{D} of 20-42 nM or less; dissociates from IL-1α with a K_{D} of 3242 nM or less; dissociates from IL-1α with a K_{D} of 7-12 nM or less; dissociates from IL-1α with a K_{D} of 3.0×10⁻⁷ M or less; dissociates from IL-1α with a K_{D} of 1.1×10⁻⁷ M or less; dissociates from IL-1α with a K_{D} of 6.1×10⁻⁸ M or less; dissociates from IL-1α with a K_{D} of 6×10⁻⁸ M or less; dissociates from IL-1α with a K_{D} of 4.2×10⁻⁸ M or less; dissociates from IL-1α with a K_{D} of 1.3×10⁻⁸ M or less; or dissociates from IL-1α with a K_{D} of 1.1×10⁻⁹ M or less. Ranges intermediate to the above recited constants, e.g., K_{D} of 1.7×10⁻⁷ M or less, are also intended to be part of this invention. For example, ranges of values using a combination of any of the above recited values as upper and/or lower limits are intended to be included.

[0146] It should be noted that the aforementioned affinity properties may also apply to single domain antibodies of the invention which bind and neutralize IL-1α or IL-1β. Surface plasmon resonance analysis may be used for determining kinetic values, including K_{D} and k_{off} values.

[0147] The IL-1α/IL-1α dual-specific antibody, or antigen-binding portion thereof, of the invention may exhibit a strong capacity to neutralize both hIL-1α and hIL-1β activity, as determined using a standard in vitro or in vivo assay (see also Examples, including Example 5). For example, in one embodiment if the invention, IL-1α/IL-1β antibodies neutralize human IL-1α in a standard in vitro assay with ND₅₀ values of about 900 nM to about 10 nM or less. The antibodies of the invention are also able to neutralize human IL-1β in a standard in vitro assay with ND₅₀ values of about 800 nM to about 200 nM or less. Alternatively or additionally, a dual-specific antibody, or antigen binding portion thereof, may inhibit the activity of one, and more preferably both, of IL-1α and/or IL-1β with an ND₅₀ of 1×10⁻⁶ M or less, even more preferably with an ND₅₀ of 1×10⁻⁷ M or less, even more preferably with an ND₅₀ of 1×10⁻⁸ M or less, even more preferably with an ND₅₀ of 1×10⁻⁹ M or less, even more preferably with an ND₅₀ of 1×10⁻¹⁰ M or less, or even more preferably with an ND₅₀ of 1×10⁻¹¹ M or less. In one embodiment, the antibody, or antigen-binding portion, neutralizes human IL-1α in a standard in vitro assay with an ND₅₀ of 900 nM or less, and/or neutralizes human IL-1β in a standard in vitro assay with an ND₅₀ of 800 nM or less. In one embodiment, the antibody, or antigen-binding portion thereof, neutralizes IL-1α in a standard in vitro assay with an ND₅₀ of 10 nM or less. In one embodiment, the antibody, or antigen-binding portion thereof, neutralizes IL-1β in a standard in vitro assay with an ND₅₀ of 200 nM or less. In one embodiment, the antibody, or antigen-binding portion thereof, neutralizes IL-1α in a standard in vitro assay with an ND₅₀ of 10 nM or less. In one embodiment, the antibody, or antigen-binding portion thereof, neutralizes IL-1β in a standard in vitro assay with an ND₅₀ of 200 nM or less. Ranges intermediate to the above recited values, e.g., ND₅₀ of 80 nM or less, ND₅₀ of 4.0×10⁻¹⁰ M or less, are also intended to be part of this invention. For example, ranges of values using a combination of any of the above recited values as upper and/or lower limits are intended to be included.

[0148] In one embodiment, neutralization properties of an antibody, or antigen-binding portion thereof, may be determined using an in vitro MRC-5 cell assay.

[0149] It should be noted that the aforementioned neutralization properties may also apply to single domain antibodies of the invention which bind and neutralize IL-1α or IL-1β.

[0150] In yet another embodiment, an antibody of the invention comprises heavy and light chain variable regions comprising amino acid sequences that are homologous to the amino acid sequences of the preferred antibodies described herein, and wherein the antibodies retain the desired functional properties of the IL-1α/IL-1β dual-specific antibodies of the invention. For example, the invention provides an isolated antibody, or antigen binding portion thereof, comprising a heavy chain variable region and a light chain variable region, wherein (a) the heavy chain variable region comprises an amino acid sequence that is at least 80% homologous to an amino acid sequence selected from the group consisting of SEQ ID NOs: 4, 16, 20, 32, 44, 52, or 53 to 92; (b) the light chain variable region comprises an amino acid sequence that is at least 80% homologous to an amino acid sequence selected from the group consisting of SEQ ID NOs: 8, 12, 24, 28, 36, 40, 48, or 93 to 133; and (c) the antibody specifically binds to IL-1α/IL-1β and exhibits at least one of the functional properties described herein, preferably several of the functional properties described herein. Also included in the invention is an isolated antibody, or antigen binding portion thereof, comprising two heavy (or two light) chain variable regions that specifically binds to IL-1α/IL-1β.

[0151] In other embodiments, the VH and/or VL amino acid sequences may be 85%, 90%, 95%, 96%, 97%, 98% or 99% homologous to the sequences set forth herein, including SEQ ID NOs: 52 to 133. An antibody having VH and VL regions having high (i.e., 80% or greater) homology to the VH and VL regions of the sequences set forth above, can be obtained by mutagenesis (e.g., site-directed or PCR-mediated mutagenesis) of nucleic acid molecules encoding SEQ ID NOs: 4, 8, 12, 16, 20, 24, 28, 32, 36, 40, 44, 48, and 52 to 133, followed by testing of the encoded altered antibody for retained function (i.e., affinity and neutralization properties) using the functional assays described herein.

[0152] In another embodiment, the invention provides nucleic acid sequences which may be 85%, 90%, 95%, 96%, 97%, 98% or 99% homologous to the sequences set forth herein, including SEQ ID NOs: 134 to 843.

[0153] As used herein, the percent homology between two amino acid sequences is equivalent to the percent identity between the two sequences. The percent identity between the two sequences is a function of the number of identical positions shared by the sequences (i.e., % homology=# of identical positions/total# of positions×100), taking into account the number of gaps, and the length of each gap, which need to be introduced for optimal alignment of the two sequences. The comparison of sequences and determination of percent identity between two sequences can be accomplished using a mathematical algorithm, as described in the non-limiting examples below.

[0154] The percent identity between two amino acid sequences can be determined using the algorithm of Meyers and Miller (Comput. Appl. Biosci., 4:11-17 (1988)) which has been incorporated into the ALIGN program (version 2.0), using a PAM120 weight residue table, a gap length penalty of 12 and a gap penalty of 4. In addition, the percent identity between two amino acid sequences can be determined using the Needleman and Wunsch (J. Mol. Biol. 48:444-453 (1970)) algorithm which has been incorporated into the GAP program in the GCG software package (available at http://www.gcg.com), using either a Blossum 62 matrix or a PAM250 matrix, and a gap weight of 16, 14, 12, 10, 8, 6, or 4 and a length weight of 1, 2, 3, 4, 5, or 6.

[0155] Additionally or alternatively, the protein sequences of the present invention can further be used as a “query sequence” to perform a search against public databases to, for example, identify related sequences. Such searches can be performed using the XBLAST program (version 2.0) of Altschul et al. (1990) J. Mol. Biol. 215:403-10. BLAST protein searches can be performed with the XBLAST program, score=50, wordlength=3 to obtain amino acid sequences homologous to the antibody molecules of the invention. To obtain gapped alignments for comparison purposes, Gapped BLAST can be utilized as described in Altschul et al. (1997) Nucleic Acids Res. 25(17):3389-3402. When utilizing BLAST and Gapped BLAST programs, the default parameters of the respective programs (e.g., XBLAST and NBLAST) can be used. See http://www.ncbi.nlm.nih.gov.

[0156] In certain embodiments, an antibody of the invention comprises a heavy chain variable region comprising CDR1, CDR2 and CDR3 sequences and a light chain variable region comprising CDR1, CDR2 and CDR3 sequences, wherein one or more of these CDR sequences comprise specified amino acid sequences based on the preferred antibodies described herein, or conservative modifications thereof, and wherein the antibodies retain the desired functional properties of the anti-IL-1α/IL-1β dual-specific antibodies of the invention.

[0157] The skilled artisan will appreciate that substitution of other amino acids within the CDR3 domains identified herein may be possible while still retaining the low off rate constant of the antibody, in particular substitutions with conservative amino acids.

[0158] Accordingly, the invention provides an isolated antibody, or antigen binding portion thereof, comprising a heavy chain variable region comprising CDR1, CDR2, and CDR3 sequences and a light chain variable region comprising CDR1, CDR2, and CDR3 sequences, wherein: (a) the heavy chain variable region CDR3 sequence comprises an amino acid sequence selected from the group consisting of amino acid sequences of SEQ ID NOs: 3, 7, 15, 19, 31, 43, and 51, and conservative modifications thereof; (b) the light chain variable region CDR3 sequence comprises an amino acid sequence selected from the group consisting of amino acid sequences of SEQ ID NOs: 11, 23, 27, 35, 39, and 47, and conservative modifications thereof, and (c) the antibody specifically binds to IL-1α/IL-1β and exhibits at least one of the functional properties described herein, more preferably several of the functional properties described herein, i.e., high affinity and neutralizing for both IL-1α/IL-1β.

[0159] In a further embodiment, the heavy chain variable region CDR2 sequence comprises an amino acid sequence selected from the group consisting of amino acid sequences of SEQ ID NOs: 2, 6, 14, 18, 30, 42, and 50, and conservative substitutions thereof, and the light chain variable region CDR2 sequence comprises an amino acid sequence selected from the group consisting of amino acid sequences of SEQ ID NOs: 10, 22, 26, 34, 38, and 46, and conservative modifications thereof. In a still further embodiment, the heavy chain variable region CDR1 sequence comprises an amino acid sequence selected from the group consisting of amino acid sequences of SEQ ID NOs: 1, 5, 13, 17, 29, 41, and 49, and conservative modifications thereof, and the light chain variable region CDR1 sequence comprises an amino acid sequence selected from the group consisting of amino acid sequences of SEQ ID NOs: 9, 21, 25, 33, 37, and 45, and conservative modifications thereof.

[0160] A “conservative amino acid substitution” or a “conservative substitution”, as used herein, is one in which one amino acid residue is replaced with another amino acid residue having a similar side chain. Families of amino acid residues having similar side chains have been defined in the art, including basic side chains (e.g., lysine, arginine, histidine), acidic side chains (e.g., aspartic acid, glutamic acid), uncharged polar side chains (e.g., glycine, asparagine, glutamine, serine, threonine, tyrosine, cysteine), nonpolar side chains (e.g., alanine, valine, leucine, isoleucine, proline, phenylalanine, methionine, tryptophan), beta-branched side chains (e.g., threonine, valine, isoleucine) and aromatic side chains (e.g., tyrosine, phenylalanine, tryptophan, histidine). Substitutions and modifications can be introduced into an antibody of the invention by standard techniques known in the art, such as site-directed mutagenesis and PCR-mediated mutagenesis. Thus, one or more amino acid residues within the CDR regions of an antibody of the invention can be replaced with other amino acid residues from the same side chain family and the altered antibody can be tested for retained function, e.g., affinity or neutralization characteristics, using the functional assays described herein.

[0161] Accordingly, another embodiment of the invention pertains to an isolated dual-specific antibody, or antigen binding portion thereof, comprising a heavy chain variable region comprising CDR1, CDR2, and CDR3 sequences comprising an amino acid sequence selected from the group consisting of SEQ ID NOs: 1, 5, 13, 17, 29, 41, and 49, SEQ ID NOs: 2, 6, 14, 18, 30, 42, and 50 and SEQ ID NOs: 3, 7, 15, 19, 31, 43, and 51, respectively, and a light chain variable region comprising CDR1, CDR2, and CDR3 sequences comprising an amino acid sequence selected from the group consisting of SEQ ID NOs: 9, 21, 25, 33, 37, and 45, SEQ ID NOs: 10, 22, 26, 34, 38, and 46 and SEQ ID NOs: 11, 23, 27, 35, 39, and 47, respectively. Thus, such antibodies contain the VH and/or VL CDR sequences of antibodies described herein, yet may contain different framework sequences from these antibodies.

[0162] Preferred human framework regions are those encoded by germline gene segments DP47 and DPK9. Advantageously, FW1, FW2 and FW3 of a VH or VL domain have the sequence of FW1, FW2 or FW3 from DP47 or DPK9. The human frameworks may optionally contain mutations, for example up to about 5 amino acid changes or up to about 10 amino acid changes collectively in the human frameworks used in the ligands of the invention.

[0163] Such framework sequences can be obtained from public DNA databases or published references that include germline antibody gene sequences. For example, germline DNA sequences for human heavy and light chain variable region genes can be found in the “VBase” human germline sequence database (available on the Internet at www.mrc-cpe.cam.ac.uk/vbase), as well as in Kabat et al. (1991) Sequences of Proteins of Immunological Interest, Fifth Edition, U.S. Department of Health and Human Services, NIH Publication No. 91-3242; Tomlinson, I. M., et al. (1992) “The Repertoire of Human Germline V_{H} Sequences Reveals about Fifty Groups of V_{H} Segments with Different Hypervariable Loops” J. Mol. Biol. 227:776-798; and Cox et al. (1994) “A Directory of Human Germ-line V_{H} Segments Reveals a Strong Bias in their Usage” Eur. J. Immunol. 24:827-836; the contents of each of which are expressly incorporated herein by reference. Preferred framework sequences for use in the antibodies of the invention are those that are structurally similar to the framework sequences used by selected antibodies of the invention. The VH CDR1, 2 and 3 sequences of SEQ ID NOs: 1, 2, 3, 5, 6, 7, 13, 14, 15, 17, 18, 19, 29, 30, 31, 41, 42, 43 49, 50, and 51 and the VL CDR1, 2 and 3 sequences of SEQ ID NOs: 9, 10, 11, 21, 22, 23, 25, 26, 27, 33, 34, 35, 37, 38, 39, 45, 46, and 47, can be grafted onto framework regions that have the same sequence as that found in the germline immunoglobulin gene from which the framework sequence derive, or the CDR sequences can be grafted onto framework regions that contain one or more mutations as compared to the germline sequences. For example, it has been found that in certain instances it is beneficial to mutate residues within the framework regions to maintain or enhance the antigen binding ability of the antibody (see e.g., U.S. Pat. Nos. 5,530,101; 5,585,089; 5,693,762 and 6,180,370 to Queen et al).

[0164] In one embodiment, an antibody of the invention may be prepared using an antibody having one or more of the V_{H} and/or V_{L} sequences disclosed herein as starting material to engineer a modified antibody, which modified antibody may have altered properties from the starting antibody. An antibody can be engineered by modifying one or more residues within one or both variable regions (i.e., V_{H} and/or V_{L}), for example within one or more CDR regions and/or within one or more framework regions. Additionally or alternatively, an antibody can be engineered by modifying residues within the constant region(s), for example to alter the effector function(s) of the antibody.

[0165] One type of variable region engineering that can be performed is CDR grafting. Antibodies interact with target antigens predominantly through amino acid residues that are located in the six heavy and light chain complementarity determining regions (CDRs). For this reason, the amino acid sequences within CDRs are more diverse between individual antibodies than sequences outside of CDRs. Because CDR sequences are responsible for most antibody-antigen interactions, it is possible to express recombinant antibodies that mimic the properties of specific naturally occurring antibodies by constructing expression vectors that include CDR sequences from the specific naturally occurring antibody grafted onto framework sequences from a different antibody with different properties (see, e.g., Riechmann et al. (1998) Nature 332:323-327; Jones. et al. (1986) Nature 321:522-525; Queen et al. (1989) Proc. Natl. Acad. See. U.S.A. 86:10029-10033; U.S. Pat. No. 5,225,539 to Winter, and U.S. Pat. Nos. 5,530,101; 5,585,089; 5,693,762 and 6,180,370 to Queen et al.)

[0166] Another type of variable region modification is to mutate amino acid residues within the VH and/or VL CDR1, CDR2 and/or CDR3 regions to thereby improve one or more binding properties (e.g., affinity) of the antibody of interest. Site-directed mutagenesis or PCR-mediated mutagenesis can be performed to introduce the mutation(s) and the effect on antibody binding, or other functional property of interest, can be evaluated in in vitro or in vivo assays as described herein and provided in the Examples. Preferably conservative modifications (as discussed above) are introduced. The mutations may be amino acid substitutions, additions or deletions, but are preferably substitutions. Moreover, typically no more than five residues are altered within a CDR region are altered.

[0167] Engineered antibodies of the invention include those in which modifications have been made to framework residues within V_{H} and/or V_{L}, e.g. to improve the properties of the antibody. Typically such framework modifications are made to decrease the immunogenicity of the antibody. For example, one approach is to “backmutate” one or more framework residues to the corresponding germline sequence. More specifically, an antibody that has undergone somatic mutation may contain framework residues that differ from the germline sequence from which the antibody is derived. Such residues can be identified by comparing the antibody framework sequences to the germline sequences from which the antibody is derived. To return the framework region sequences to their germline configuration, the somatic mutations can be “backmutated” to the germline sequence by, for example, site-directed mutagenesis or PCR-mediated mutagenesis.

[0168] Another type of framework modification involves mutating one or more residues within the framework region, or even within one or more CDR regions, to remove T cell epitopes to thereby reduce the potential immunogenicity of the antibody. This approach is also referred to as “deimmunization” and is described in further detail in U.S. patent Publication No. 20030153043 by Carr et al.

[0169] In addition or alternative to modifications made within the framework or CDR regions, dual-specific antibodies of the invention may be engineered to include modifications within the Fc region, typically to alter one or more functional properties of the antibody, such as serum half-life, complement fixation, Fc receptor binding, and/or antigen-dependent cellular cytotoxicity. Furthermore, an antibody of the invention may be chemically modified (e.g., one or more chemical moieties can be attached to the antibody) or be modified to alter it's glycosylation, again to alter one or more functional properties of the antibody. Each of these embodiments is described in further detail below. The numbering of residues in the Fc region is that of the EU index of Kabat.

[0170] In one embodiment, the hinge region of CH1 is modified such that the number of cysteine residues in the hinge region is altered, e.g., increased or decreased. This approach is described further in U.S. Pat. No. 5,677,425 by Bodmer et al. The number of cysteine residues in the hinge region of CH1 is altered to, for example, facilitate assembly of the light and heavy chains or to increase or decrease the stability of the dual-specific antibody.

[0171] In another embodiment, the Fc hinge region of the antibody of the invention is mutated to decrease the biological half life of the antibody. More specifically, one or more amino acid mutations are introduced into the CH2-CH3 domain interface region of the Fc-hinge fragment such that the antibody has impaired Staphylococcyl protein A (SpA) binding relative to native Fc-hinge domain SpA binding. This approach is described in further detail in U.S. Pat. No. 6,165,745 by Ward et al.

[0172] In another embodiment, the antibody of the invention is modified to increase its biological half life. Various approaches are possible. For example, one or more of the following mutations can be introduced: T252L, T254S, T256F, as described in U.S. Pat. No. 6,277,375 to Ward. Alternatively, to increase the biological half life, the antibody may be altered within the CH1 or CL region to contain a salvage receptor binding epitope taken from two loops of a CH2 domain of an Fc region of an IgG, as described in U.S. Pat. Nos. 5,869,046 and 6,121,022 by Presta et al.

[0173] In yet other embodiments, the Fc region is altered by replacing at least one amino acid residue with a different amino acid residue to alter the effector function(s) of the dual-specific antibody. For example, one or more amino acids selected from amino acid residues 234, 235, 236, 237, 297, 318, 320 and 322 can be replaced with a different amino acid residue such that the antibody has an altered affinity for an effector antibody but retains the antigen-binding ability of the parent antibody. The effector antibody to which affinity is altered can be, for example, an Fc receptor or the Cl component of complement. This approach is described in further detail in U.S. Pat. Nos. 5,624,821 and 5,648,260, both by Winter et al.

[0174] In another example, one or more amino acids selected from amino acid residues 329, 331 and 322 can be replaced with a different amino acid residue such that the dual-specific antibody has altered Clq binding and/or reduced or abolished complement dependent cytotoxicity (CDC). This approach is described in further detail in U.S. Pat. No. 6,194,551 by Idusogie et al.

[0175] In another example, one or more amino acid residues within amino acid positions 231 and 239 are altered to thereby alter the ability of the antibody to fix complement. This approach is described further in PCT Publication WO 94/29351 by Bodmer et al.

[0176] In yet another example, the Fc region is modified to increase the ability of the dual-specific antibody to mediate antibody dependent cellular cytotoxicity (ADCC) and/or to increase the affinity of the antibody for an Fcγ receptor by modifying one or more amino acids at the following positions: 238, 239, 248, 249, 252, 254, 255, 256, 258, 265, 267, 268, 269, 270, 272, 276, 278, 280, 283, 285, 286, 289, 290, 292, 293, 294, 295, 296, 298, 301, 303, 305, 307, 309, 312, 315, 320, 322, 324, 326, 327, 329, 330, 331, 333, 334, 335, 337, 338, 340, 360, 373, 376, 378, 382, 388, 389, 398, 414, 416, 419, 430, 434, 435, 437, 438 or 439. This approach is described further in PCT Publication WO 00/42072 by Presta. Moreover, the binding sites on human IgG1 for FcγRI, FcγRII, FcγRIII and FcRn have been mapped and variants with improved binding have been described (see Shields et al. (2001) J. Biol. Chem. 276:6591-6604). Specific mutations at positions 256, 290, 298, 333, 334 and 339 were shown to improve binding to FcγRIII. Additionally, the following combination mutants were shown to improve FcγRIII binding: T256A/S298A, S298A/E333A, S298A/K224A and S298A/E333A/K334A.

[0177] In still another embodiment, the glycosylation of an antibody is modified. For example, an aglycoslated antibody can be made (i.e., the antibody lacks glycosylation). Glycosylation can be altered to, for example, increase the affinity of the antibody for antigen. Such carbohydrate modifications can be accomplished by, for example, altering one or more sites of glycosylation within the antibody sequence. For example, one or more amino acid substitutions can be made that result in elimination of one or more variable region framework glycosylation sites to thereby eliminate glycosylation at that site. Such aglycosylation may increase the affinity of the antibody for antigen. Such an approach is described in further detail in U.S. Pat. Nos. 5,714,350 and 6,350,861 by Co et al.

[0178] Additionally or alternatively, an antibody can be made that has an altered type of glycosylation, such as a hypofucosylated antibody having reduced amounts of fucosyl residues or an antibody having increased bisecting GlcNac structures. Such altered glycosylation patterns have been demonstrated to increase the ADCC ability of antibodies. Such carbohydrate modifications can be accomplished by, for example, expressing the antibody in a host cell with altered glycosylation machinery. Cells with altered glycosylation machinery have been described in the art and can be used as host cells in which to express recombinant antibodies of the invention to thereby produce an antibody with altered glycosylation. For example, EP 1,176,195 by Hanai et al. describes a cell line with a functionally disrupted FUT8 gene, which encodes a fucosyl transferase, such that antibodies expressed in such a cell line exhibit hypofucosylation. PCT Publication WO 03/035835 by Presta describes a variant CHO cell line, Lec13 cells, with reduced ability to attach fucose to Asn(297)-linked carbohydrates, also resulting in hypofucosylation of antibodies expressed in that host cell (see also Shields et al. (2002) J. Biol. Chem. 277:26733-26740). PCT Publication WO 99/54342 by Umana et al. describes cell lines engineered to express glycoprotein-modifying glycosyl transferases (e.g., beta(1,4)—N-acetylglucosaminyltransferase III (GnTIII)) such that antibodies expressed in the engineered cell lines exhibit increased bisecting GlcNac structures which results in increased ADCC activity of the antibodies (see also Umana et al. (1999) Nat. Biotech. 17:176-180).

[0179] Another modification of the antibodies herein that is contemplated by the invention is pegylation. An antibody can be pegylated to, for example, increase the biological (e.g., serum) half life of the antibody. To pegylate an antibody, the antibody, or fragment thereof, typically is reacted with polyethylene glycol (PEG), such as a reactive ester or aldehyde derivative of PEG, under conditions in which one or more PEG groups become attached to the antibody or antibody fragment. Preferably, the pegylation is carried out via an acylation reaction or an alkylation reaction with a reactive PEG molecule (or an analogous reactive water-soluble polymer). As used herein, the term “polyethylene glycol” is intended to encompass any of the forms of PEG that have been used to derivatize other proteins, such as mono (C1-C10) alkoxy- or aryloxy-polyethylene glycol or polyethylene glycol-maleimide. In certain embodiments, the antibody to be pegylated is an aglycosylated antibody. Methods for pegylating proteins are known in the art and can be applied to the antibodies of the invention. See for example, EP 0 154 316 by Nishimura et al. and EP 0 401 384 by Ishikawa et al.

[0180] In a further aspect, the present invention provides a composition comprising a dual-specific antibody, or antigen-binding portion thereof, obtainable by a method described herein or known in the art, and a pharmaceutically acceptable carrier, diluent or excipient.

[0181] Moreover, the present invention provides a method for the treatment and/or prevention of disease using a dual-specific antibody, or antigen-binding portion thereof, or a composition according to the present invention.

### III. Methods of Making IL-1α/IL-1β Dual-Specific Antibodies

[0182] Dual-specific antibodies of the invention may be prepared according to established techniques used in the field of antibody engineering. Techniques for the preparation of antibodies, and in particular dual-specific antibodies, are, for example, described in the following reviews and the references cited therein: Winter & Milstein, (1991) Nature 349:293-299; Plueckthun (1992) Immunological Reviews 130:151-188; Wright et al., (1992) Crit. Rev. Immunol. 12:125-168; Holliger, P. &Winter, G. (1993) Curr. Op. Biotechn. 4, 446-449; Carter, et al. (1995) J. Hematother. 4, 463-470; Chester, & Hawkins (1995) Trends Biotechn. 13, 294-300; Hoogenboom, H. R. (1997) Nature Biotechnol. 15, 125-126; Fearon, D. (1997) Nature Biotechnol. 15, 618-619; Pluckthun, A. & Pack, P. (1997) Immunotechnology 3, 83-105; Carter & Merchant (1997) Curr. Opin. Biotechnol. 8, 449-454; Holliger & Winter (1997) Cancer Immunol. Immunother. 45, 128-130.

[0183] The invention provides for the selection of variable domains against two different antigens or epitopes, i.e., IL-1α or IL-1β, and subsequent combination of the variable domains into a dual-specific antibody, or antigen-binding portion thereof.

[0184] The techniques employed for selection of the IL-1α or IL-1β-specific variable domains employ libraries and selection procedures which are known in the art. Natural libraries (Marks et al. (1991) J. Mol. Biol., 222: 581; Vaughan et al. (1996) Nature Biotech., 14: 309) which use rearranged V genes harvested from human B cells are well known to those skilled in the art. Synthetic libraries (Hoogenboom & Winter (1992) J. Mol. Biol., 227: 381; Barbas et al. (1992) Proc. Natl. Acad. Sci. USA, 89: 4457; Nissim et al. (1994) EMBO J., 13: 692; Griffiths et al. (1994) EMBO J., 13: 3245; De Kruif et al. (1995) J. Mol. Biol., 248: 97) are prepared by cloning immunoglobulin V genes, usually using PCR. Errors in the PCR process can lead to a high degree of randomisation. VH and/or VL libraries may be selected against target antigens or epitopes separately, in which case single domain binding is directly selected for, or together.

[0185] A preferred method for making a dual-specific antibody according to the present invention comprises using a selection system in which a repertoire of variable domains is selected for binding to a first antigen or epitope (i.e., IL-1α or IL-1β) and a repertoire of variable domains is selected for binding to a second antigen or epitope (i.e., IL-1α or IL-1β). The selected variable first and second variable domains are then combined and the dual-specific antibody selected for binding to both first and second antigen or epitope.

[0186] In one embodiment, the antibody or antigen-binding portion thereof, is identified through a method comprising the general steps of: (a) selecting a first variable domain by its ability to bind to a first epitope (i.e., IL-1α or IL-1β), (b) selecting a second variable region by its ability to bind to a second epitope (i.e., IL-1α or IL-1β), (c) combining the variable domains; and (d) selecting the antibody, or antigen-binding portion thereof, by its ability to bind to said first epitope and to said second epitope.

[0187] In a preferred embodiment of the invention, the variable regions are selected from single domain V gene repertoires. Generally the repertoire of single antibody domains is displayed on the surface of filamentous bacteriophage. In a preferred embodiment each single antibody domain is selected by binding of a phage repertoire to antigen.

[0188] In a preferred embodiment of the invention each single variable domain may be selected for binding to its target antigen or epitope in the absence of a complementary variable region. In an alternative embodiment, the single variable domains may be selected for binding to its target antigen or epitope in the presence of a complementary variable region. Thus the first single variable domain may be selected in the presence of a third complementary variable domain, and the second variable domain may be selected in the presence of a fourth complementary variable domain. The complementary third or fourth variable domain may be the natural cognate variable domain having the same specificity as the single domain being tested, or a non-cognate complementary domain—such as a “dummy” variable domain.

### Library Vector Systems

[0189] A variety of selection systems are known in the art which are suitable for use in the present invention. Examples of such systems are described below.

[0190] Phage display technology (see, e.g., Smith (1985) Science 228:1315; Scott and Smith (1990) Science 249:386; McCafferty et al. (1990) Nature 348: 552) provides an approach for the selection of antibody polypeptides which bind a desired target from among large, diverse repertoires of antibody polypeptides. Phage display libraries may contain synthetic libraries whereby germline V gene segments are ‘rearranged’ in vitro (Hoogenboom and Winter (1992) J Mol Bio 227:381; Nissim et al. (1994) EMBO J., 13: 692; Griffiths et al. (1994) EMBO J., 13: 3245; De Kruif et al. (1995) J. Mol. Biol., 248: 97) or where synthetic CDRs are incorporated into a single rearranged V gene (Barbas et al. (1992) PNAs 89:4457). Most often, the antibody polypeptides displayed on the phage comprise antigen-binding antibody fragments. In one embodiment, the antibody polypeptides displayed on the phage are single domains (dAbs).

[0191] Bacteriophage lambda expression systems may be screened directly as bacteriophage plaques or as colonies of lysogens, both as previously described (Huse et al. (1989) Science, 246: 1275; Caton and Koprowski (1990) Proc. Natl. Acad. Sci. U.S.A., 87; Mullinax et al. (1990) Proc. Natl. Acad. Sci. U.S.A., 87: 8095; Persson et al. (1991) Proc. Natl. Acad. Sci. U.S.A., 88: 2432) and are of use in the invention. Whilst such expression systems can be used to screen up to 106 different members of a library, they are not really suited to screening of larger numbers (greater than 106 members).

[0192] Of particular use in the construction of libraries are selection display systems, which enable a nucleic acid to be linked to the polypeptide it expresses. As used herein, a selection display system is a system that permits the selection, by suitable display means, of the individual members of the library by binding the generic and/or target ligands.

[0193] Selection protocols for isolating desired members of large libraries are known in the art, as typified by phage display techniques. Such systems, in which diverse peptide sequences are displayed on the surface of filamentous bacteriophage (Scott and Smith (1990) Science, 249: 386), have proven useful for creating libraries of antibody fragments (and the nucleotide sequences that encoding them) for the in vitro selection and amplification of specific antibody fragments that bind a target antigen (McCafferty et al., WO 92/01047). The nucleotide sequences encoding the VH and VL regions are linked to gene fragments which encode leader signals that direct them to the periplasmic space of E. coli and as a result the resultant antibody fragments are displayed on the surface of the bacteriophage, typically as fusions to bacteriophage coat proteins (e.g., pIII or pVIII). Alternatively, antibody fragments are displayed externally on lambda phage capsids (phagebodies). An advantage of phage-based display systems is that, because they are biological systems, selected library members can be amplified simply by growing the phage containing the selected library member in bacterial cells. Furthermore, since the nucleotide sequence that encode the polypeptide library member is contained on a phage or phagemid vector, sequencing, expression and subsequent genetic manipulation is relatively straightforward.

[0194] Methods for the construction of bacteriophage antibody display libraries and lambda phage expression libraries are well known in the art (McCafferty et al. (1990) Nature, 348: 552; Kang et al. (1991) Proc. Natl. Acad. Sci. U.S.A., 88: 4363; Clackson et al. (1991) Nature, 352: 624; Lowman et al. (1991) Biochemistry, 30: 10832; Burton et al. (1991) Proc. Natl. Acad. Sci. U.S.A., 88: 10134; Hoogenboom et al. (1991) Nucleic Acids Res., 19: 4133; Chang et al. (1991) J. Immunol., 147: 3610; Breitling et al. (1991) Gene, 104: 147; Marks et al. (1991) supra; Barbas et al. (1992) supra; Hawkins and Winter (1992) J. Immunol., 22: 867; Marks et al., 1992, J. Biol. Chem., 267:16007; Lerner et al. (1992) Science, 258:1313, incorporated herein by reference).

[0195] One particularly advantageous approach has been the use of scFv phage-libraries (Huston et al., 1988, Proc. Natl. Acad. Sci. U.S.A., 85: 5879-5883; Chaudhary et al. (1990) Proc. Natl. Acad. Sci. U.S.A., 87:1066-1070; McCafferty et al. (1990) supra; Clackson et al. (1991) Nature, 352: 624; Marks et al. (1991) J. Mol. Biol., 222: 581; Chiswell et al. (1992) Trends Biotech., 10: 80; Marks et al. (1992) J. Biol. Chem., 267). Various embodiments of scFv libraries displayed on bacteriophage coat proteins have been described. Refinements of phage display approaches are also known, for example as described in WO96/06213 and WO92/01047 (Medical Research Council et al.) and WO97/08320 (Morphosys), which are incorporated herein by reference.

[0196] Other systems for generating libraries of polypeptides involve the use of cell-free enzymatic machinery for the in vitro synthesis of the library members. In one method, RNA molecules are selected by alternate rounds of selection against a target antibody and PCR amplification (Tuerk and Gold (1990) Science, 249: 505; Ellington and Szostak (1990) Nature, 346: 818). A similar technique may be used to identify DNA sequences which bind a predetermined human transcription factor (Thiesen and Bach (1990) Nucleic Acids Res., 18: 3203; Beaudry and Joyce (1992) Science, 257: 635; WO92/05258 and WO92/14843). In a similar way, in vitro translation can be used to synthesize polypeptides as a method for generating large libraries. These methods which generally comprise stabilized polysome complexes, are described further in WO88/08453, WO90/05785, WO90/07003, WO91/02076, WO91/05058, and WO92/02536. Alternative display systems which are not phage-based, such as those disclosed in WO95/22625 and WO95/11922 (Affymax) use the polysomes to display polypeptides for selection.

[0197] A still further category of techniques involves the selection of repertoires in artificial compartments, which allow the linkage of a gene with its gene product. For example, a selection system in which nucleic acids encoding desirable gene products may be selected in microcapsules formed by water-in-oil emulsions is described in WO99/02671, WO00/40712 and Tawfik & Griffiths (1998) Nature Biotechnol 16(7), 652-6. Genetic elements encoding a gene product having a desired activity are compartmentalized into microcapsules and then transcribed and/or translated to produce their respective gene products (RNA or protein) within the microcapsules. Genetic elements which produce gene product having desired activity are subsequently sorted. This approach selects gene products of interest by detecting the desired activity by a variety of means.

### Library Construction

[0198] Libraries intended for selection, may be constructed using techniques known in the art, for example as set forth above, or may be purchased from commercial sources. Libraries which are useful in the present invention are described, for example, in WO99/20749. Once a vector system is chosen and one or more nucleic acid sequences encoding polypeptides of interest are cloned into the library vector, one may generate diversity within the cloned molecules by undertaking mutagenesis prior to expression; alternatively, the encoded proteins may be expressed and selected, as described above, before mutagenesis and additional rounds of selection are performed. Mutagenesis of nucleic acid sequences encoding structurally optimized polypeptides is carried out by standard molecular methods. Of particular use is the polymerase chain reaction, or PCR, (Mullis and Faloona (1987) Methods Enzymol., 155: 335, herein incorporated by reference). PCR, which uses multiple cycles of DNA replication catalyzed by a thermostable, DNA-dependent DNA polymerase to amplify the target sequence of interest, is well known in the art. The construction of various antibody libraries has been discussed in Winter et al. (1994) Ann. Rev. Immunology 12, 433-55, and references cited therein.

[0199] For example, PCR may be performed using template DNA (at least 1 fg; more usefully, 1-1000 ng) and at least 25 pmol of oligonucleotide primers; it may be advantageous to use a larger amount of primer when the primer pool is heavily heterogeneous, as each sequence is represented by only a small fraction of the molecules of the pool, and amounts become limiting in the later amplification cycles. A typical reaction mixture includes: 2 μl of DNA, 25 pmol of oligonucleotide primer, 2.5 W of 10×PCR buffer 1 (Perkin-Elmer, Foster City, Calif.), 0.4 μl of 1.25 μ.M dNTP, 0.15 μl (or 2.5 units) of Taq DNA polymerase (Perkin Elmer, Foster City, Calif.) and deionized water to a total volume of 25 μl. Mineral oil is overlaid and the PCR is performed using a programmable thermal cycler. The length and temperature of each step of a PCR cycle, as well as the number of cycles, is adjusted in accordance to the stringency requirements in effect. Annealing temperature and timing are determined both by the efficiency with which a primer is expected to anneal to a template and the degree of mismatch that is to be tolerated; obviously, when nucleic acid molecules are simultaneously amplified and mutagenised, mismatch is required, at least in the first round of synthesis. The ability to optimize the stringency of primer annealing conditions is well within the knowledge of one of moderate skill in the art. An annealing temperature of between 30° C. and 72° C. is used. Initial denaturation of the template molecules normally occurs at between 92° C. and 99° C. for 4 minutes, followed by 2040 cycles consisting of denaturation (94-99° C. for 15 seconds to 1 minute), annealing (temperature determined as discussed above; 1-2 minutes), and extension (72° C. for 1-5 minutes, depending on the length of the amplified product). Final extension is generally for 4 minutes at 72° C., and may be followed by an indefinite (0-24 hour) step at 4° C.

[0200] Vector constructs or libraries of vectors containing polynucleotide molecules as described herein can be introduced to selected host cells by any of a number of suitable methods known in the art. For example, vector constructs may be introduced to appropriate bacterial cells by infection, in the case of bacteriophage vector particles such as lambda or M13, or any of a number of transformation methods for plasmid vectors or for bacteriophage DNA.

[0201] In one embodiment, a phage displayed repertoire of V_{H} or V_{L} domains is screened by panning against either IL-1α or IL-1β.

### Combining Single Variable Domains

[0202] IL-1α or IL-1β specific domains useful in the invention, once selected, may be combined by a variety of methods known in the art, including by covalent and non-covalent methods.

[0203] Preferred methods include the use of polypeptide linkers, as described, for example, in connection with scFv molecules (Bird et al., (1988) Science 242:423-426). Discussion of suitable linkers is provided in Bird et al. Science 242, 423-426; Hudson et al, Journal Immunol Methods 231 (1999) 177-189; Hudson et al, Proc Nat Acad Sci USA 85, 5879-5883. Linkers are preferably flexible, allowing the two single domains to interact. One linker example is a (Gly₄ Ser)ₙ linker, where n=1 to 8, e.g., 2, 3, 4, 5 or 7. The linkers used in diabodies, which are less flexible, may also be employed (Holliger et al., (1993) PNAS (USA) 90:6444-6448).

[0204] In one embodiment, the linker employed is not an immunoglobulin hinge region.

[0205] Variable domains may be combined using methods other than linkers. For example, the use of disulphide bridges, provided through naturally-occurring or engineered cysteine residues, may be exploited to stabilise VH-VH, VL-VL or VH-VL dimers (Reiter et al., (1994) Protein Eng. 7:697-704) or by remodelling the interface between the variable domains to improve the “fit” and thus the stability of interaction (Ridgeway et al., (1996) Protein Eng. 7:617-621; Zhu et. al., (1997) Protein Science 6:781-788).

### Characterization of IL-1 Antibody

[0206] The binding of an antibody to its specific antigens or epitopes can be tested by methods which will be familiar to those skilled in the art and include ELISA.

[0207] In a one embodiment of the invention, binding of the single domain of the invention is tested using monoclonal phage ELISA according to standard methods.

[0208] Populations of phage produced at each round of selection can be screened for binding by ELISA to the selected antigen or epitope, to identify “polyclonal” phage antibodies. Phage from single infected bacterial colonies from these populations can then be screened by ELISA to identify “monoclonal” phage antibodies. It is also desirable to screen soluble antibody fragments for binding to antigen or epitope, and this can also be undertaken by ELISA using reagents, for example, against a C- or N-terminal tag (see for example Winter et al. (1994) Ann. Rev. Immunology 12, 433-55 and references cited therein.

[0209] The diversity of the selected phage monoclonal antibodies may also be assessed by gel electrophoresis of PCR products (Marks et al. 1991, supra; Nissim et al. 1994 supra), probing (Tomlinson et al., 1992) J. Mol. Biol. 227, 776) or by sequencing of the vector DNA.

[0210] Assays for detecting IL-1 are known in the art and may be used to determine the ability of a dual-specific antibody for neutralizing IL-1α and/or IL-1β.

### Structure of Dual-Specific Antibodies

[0211] As described above, an antibody is herein defined as an antibody (for example IgG, IgM, IgA, IgA, IgE) or fragment (Fab, Fv, disulphide linked Fv, scFv, diabody) which comprises at least one heavy and a light chain variable domain, at least two heavy chain variable domains or at least two light chain variable domains. An antibody may be at least partly derived from any species naturally producing an antibody, or created by recombinant DNA technology; whether isolated from serum, B-cells, hybridomas, transfectomas, yeast or bacteria).

[0212] In a preferred embodiment of the invention the dual-specific antibody comprises at least one single heavy chain variable domain of an antibody and one single light chain variable domain of an antibody, or two single heavy or light chain variable domains. For example, the antibody may comprise a VH/VL pair, a pair of VH domains, or a pair of VL domains.

[0213] The first and the second variable domains of such an antibody may be on the same polypeptide chain. Alternatively they may be on separate polypeptide chains. In the case that they are on the same polypeptide chain they may be linked by a linker, which is preferentially a peptide sequence, as described above.

[0214] The first and second variable domains may be covalently or non-covalently associated. In the case that they are covalently associated, the covalent bonds may be disulphide bonds.

[0215] In the case that the variable domains are selected from V-gene repertoires selected for instance using phage display technology as herein described, then these variable domains comprise a universal framework region, such that is they may be recognised by a specific generic ligand as herein defined. The use of universal frameworks, generic ligands and the like is described in WO99/20749.

[0216] Where V-gene repertoires are used variation in polypeptide sequence is preferably located within the structural loops of the variable domains. The polypeptide sequences of either variable domain may be altered by DNA shuffling or by mutation in order to enhance the interaction of each variable domain with its complementary pair. DNA shuffling is known in the art and taught, for example, by Stemmer, 1994, Nature 370: 389-391 and U.S. Pat. No. 6,297,053, both of which are incorporated herein by reference. Other methods of mutagenesis are well known to those of skill in the art.

[0217] According to another aspect of the invention, advantageously, the epitope binding domains identified in the screening process described above, are attached to a “protein skeleton”. Advantageously, a protein skeleton according to the invention is an immunoglobulin skeleton.

[0218] According to the present invention, the term ‘immunoglobulin skeleton’ refers to a protein which comprises at least one immunoglobulin fold and which acts as a nucleus for one or more epitope binding domains, as defined herein.

[0219] Preferred immunoglobulin skeletons as herein defined includes any one or more of those selected from the following: an immunoglobulin molecule comprising at least (i) the CL (kappa or lambda subclass) domain of an antibody; or (ii) the CH1 domain of an antibody heavy chain; an immunoglobulin molecule comprising the CH1 and CH2 domains of an antibody heavy chain; an immunoglobulin molecule comprising the CH1, CH2 and CH3 domains of an antibody heavy chain; or any of the subset (ii) in conjunction with the CL (kappa or lambda subclass) domain of an antibody. A hinge region domain may also be included. Such combinations of domains may, for example, mimic natural antibodies, such as IgG or IgM, or fragments thereof, such as Fv, scFv, Fab or F(ab′)₂ molecules. Those skilled in the art will be aware that this list is not intended to be exhaustive.

[0220] Linking of the skeleton to the epitope binding domains, as herein defined may be achieved at the polypeptide level, that is after expression of the nucleic acid encoding the skeleton and/or the epitope binding domains. Alternatively, the linking step may be performed at the nucleic acid level. Methods of linking a protein skeleton according to the present invention, to the one or more epitope binding domains include the use of protein chemistry and/or molecular biology techniques which will be familiar to those skilled in the art and are described herein.

[0221] Skeletons may be based on immunoglobulin molecules or may be non-immunoglobulin in origin as set forth above. Preferred immunoglobulin skeletons as herein defined includes any one or more of those selected from the following: an immunoglobulin molecule comprising at least (i) the CL (kappa or lambda subclass) domain of an antibody; or (ii) the CH1 domain of an antibody heavy chain; an immunoglobulin molecule comprising the CH1 and CH2 domains of an antibody heavy chain; an immunoglobulin molecule comprising the CH1, CH2 and CH3 domains of an antibody heavy chain; or any of the subset (ii) in conjunction with the CL (kappa or lambda subclass) domain of an antibody. A hinge region domain may also be included. Such combinations of domains may, for example, mimic natural antibodies, such as IgG or IgM, or fragments thereof, such as Fv, scFv, Fab or F(ab′)₂ molecules. Those skilled in the art will be aware that this list is not intended to be exhaustive.

[0222] In a one embodiment of the invention the dual-specific antibody is a single chain Fv fragment. In an alternative embodiment of the invention, the dual-specific antibody consists of a Fab format.

[0223] In a further aspect, the present invention provides nucleic acid encoding a dual-specific antibody as herein defined. In another embodiment, the invention provides a nucleic acid encoding a dAb identified herein.

[0224] One skilled in the art will appreciate that, depending on the aspect of the invention, both antigens or epitopes may bind simultaneously to the same antibody molecule. Alternatively, they may compete for binding to the same antibody molecule. For example, where both epitopes are bound simultaneously, both variable domains of a dual-specific antibodies are able to independently bind their target epitopes. Where the domains compete, the one variable domain is capable of binding its target, but not at the same time as the other variable domain binds its cognate target; or the first variable domain is capable of binding its target, but not at the same time as the second variable domain binds its cognate target.

[0225] The variable regions may be derived from antibodies directed against target antigens or epitopes. Alternatively they may be derived from a repertoire of single antibody domains such as those expressed on the surface of filamentous bacteriophage. Selection may be performed as described above and in the Examples provided herein.

[0226] In general, the nucleic acid molecules and vector constructs required for the performance of the present invention may be constructed and manipulated as set forth in standard laboratory manuals, such as Sambrook et al. (1989) Molecular Cloning: A Laboratory Manual, Cold Spring Harbor, USA.

[0227] The manipulation of nucleic acids useful in the present invention is typically carried out in recombinant vectors.

[0228] Thus in a further aspect, the present invention provides a vector comprising nucleic acid encoding at least a dual-specific antibody as herein defined. In another embodiment, the invention provides a vector comprising a nucleic acid encoding a dAb identified herein.

[0229] Methods by which to select or construct and, subsequently, use vectors are well known to one of ordinary skill in the art. Numerous vectors are publicly available, including bacterial plasmids, bacteriophage, artificial chromosomes and episomal vectors. Such vectors may be used for simple cloning and mutagenesis; alternatively gene expression vector is employed. A vector of use according to the invention may be selected to accommodate a polypeptide coding sequence of a desired size, typically from 0.25 kilobase (kb) to 40 kb or more in length A suitable host cell is transformed with the vector after in vitro cloning manipulations. Each vector contains various functional components, which generally include a cloning (or “polylinker”) site, an origin of replication and at least one selectable marker gene. If given vector is an expression vector, it additionally possesses one or more of the following: enhancer element, promoter, transcription termination and signal sequences, each positioned in the vicinity of the cloning site, such that they are operatively linked to the gene encoding an antibody according to the invention.

[0230] Both cloning and expression vectors generally contain nucleic acid sequences that enable the vector to replicate in one or more selected host cells. Typically in cloning vectors, this sequence is one that enables the vector to replicate independently of the host chromosomal DNA and includes origins of replication or autonomously replicating sequences. Such sequences are well known for a variety of bacteria, yeast and viruses. The origin of replication from the plasmid pBR322 is suitable for most Gram-negative bacteria, the 2 micron plasmid origin is suitable for yeast, and various viral origins (e.g. SV 40, adenovirus) are useful for cloning vectors in mammalian cells. Generally, the origin of replication is not needed for mammalian expression vectors unless these are used in mammalian cells able to replicate high levels of DNA, such as COS cells.

[0231] Advantageously, a cloning or expression vector may contain a selection gene also referred to as selectable marker. This gene encodes a protein necessary for the survival or growth of transformed host cells grown in a selective culture medium. Host cells not transformed with the vector containing the selection gene will therefore not survive in the culture medium. Typical selection genes encode proteins that confer resistance to antibiotics and other toxins, e.g. ampicillin, neomycin, methotrexate or tetracycline, complement auxotrophic deficiencies, or supply critical nutrients not available in the growth media.

[0232] Since the replication of vectors encoding an antibody according to the present invention is most conveniently performed in E. coli, an E. coli-selectable marker, for example, the β-lactamase gene that confers resistance to the antibiotic ampicillin, is of use. These can be obtained from E. coli plasmids, such as pBR322 or a pUC plasmid such as pUC18 or pUC19.

[0233] Expression vectors usually contain a promoter that is recognised by the host organism and is operably linked to the coding sequence of interest. Such a promoter may be inducible or constitutive. The term “operably linked” refers to a juxtaposition wherein the components described are in a relationship permitting them to function in their intended manner. A control sequence “operably linked” to a coding sequence is ligated in such a way that expression of the coding sequence is achieved under conditions compatible with the control sequences.

[0234] Promoters suitable for use with prokaryotic hosts include, for example, the β-lactamase and lactose promoter systems, alkaline phosphatase, the tryptophan (trp) promoter system and hybrid promoters such as the tac promoter. Promoters for use in bacterial systems will also generally contain a Shine-Delgarno sequence operably linked to the coding sequence.

[0235] The preferred vectors are expression vectors that enable the expression of a nucleotide sequence corresponding to a polypeptide library member. Thus, selection with the first and/or second antigen or epitope can be performed by separate propagation and expression of a single clone expressing the polypeptide library member or by use of any selection display system. As described above, the preferred selection display system is bacteriophage display. Thus, phage or phagemid vectors may be used, eg pIT1 or pIT2. Leader sequences useful in the invention include pelB, stII, ompA, phoA, bla and pelA. One example are phagemid vectors which have an E. coli origin of replication (for double stranded replication) and also a phage origin of replication (for production of single-stranded DNA). The manipulation and expression of such vectors is well known in the art (Hoogenboom and Winter (1992) supra; Nissim et al. (1994) supra). Briefly, the vector contains a β-lactamase gene to confer selectivity on the phagemid and a lac promoter upstream of a expression cassette that consists (N to C terminal) of a pelB leader sequence (which directs the expressed polypeptide to the periplasmic space), a multiple cloning site (for cloning the nucleotide version of the library member), optionally, one or more peptide tag (for detection), optionally, one or more TAG stop codon and the phage protein pIII. Thus, using various suppressor and non-suppressor strains of E. coli and with the addition of glucose, iso-propyl thio-β-D-galactoside (IPTG) or a helper phage, such as VCS M13, the vector is able to replicate as a plasmid with no expression, produce large quantities of the polypeptide library member only or produce phage, some of which contain at least one copy of the polypeptide-pIII fusion on their surface.

[0236] The invention provides improved vectors for expressing an antibody heavy or light chain, or an antigen-binding portion thereof. The vectors of the invention may also be used for library screening, as they provide efficient cloning for screening purposes. In one embodiment, the invention provides an improved recombinant expression vector comprising a stuffer sequence, e.g., 1 kb, which is in between an upstream signal sequence and a downstream Ig constant region sequence. In order to make an antibody heavy or light chain construct, the stuffer sequence in the chosen master template (or vector) is removed by restriction enzyme digestion followed by inserting the desired antibody V domain sequence (e.g., VH, Vκ, or Vγ). The resulting plasmid construct is easily propogated in and purified from E. coli and can be used to express antibody by co-transfecting both a heavy chain and a light chain construct in mammalian cells, such as COS cells. Examples of vector sequences encompassed by the invention are provided in SEQ ID NO: 844, SEQ ID NO: 845, SEQ ID NO: 846, SEQ ID NO: 847, SEQ ID NO: 848, SEQ ID NO: 849, SEQ ID NO: 850, SEQ ID NO: 851, SEQ ID NO: 852, SEQ ID NO: 853, SEQ ID NO: 854, and SEQ ID NO: 855. It should be noted that nucleic acid sequences that are 80% identical, 90% identical, 95% identical, 98% identical, and 99% identical to SEQ ID NO: 844, SEQ ID NO: 845, SEQ ID NO: 846, SEQ ID NO: 847, SEQ ID NO: 848, SEQ ID NO: 849, SEQ ID NO: 850, SEQ ID NO: 851, SEQ ID NO: 852, SEQ ID NO: 853, SEQ ID NO: 854, and SEQ ID NO: 855 are also contemplated as part of the invention. An example of the vector of the invention is also provided in FIG. 19.

[0237] The size of the stuffer sequence will vary depending on the gene of interest being ligated or recombined into the vector. Generally, the stuffer sequence cannot be too small, i.e., less than 100 bp, as it should be large enough to visualize on an analytical agarose gel to confirm the excision of the stuffer. In theory, however, the theoretical lower limitation may be about 10 base pairs, as this size may provide enough distance between the two sites for efficient enzyme cutting (without confirmation by gel electrophoresis). While there is no upper limit in size to the stuffer sequence, it is not desirable to have a stuffer sequence which is larger than the vector itself, especially for distinguishing between the stuffer and linear cut vector on an agarose gel. In one embodiment, the stuffer sequence is less than 3 kilobases, but larger than 10 base pairs. In another embodiment, the stuffer sequence is less than 3 kilobases, but larger than 50 base pairs. In another embodiment, the stuffer sequence is less than 3 kilobases, but larger than 80 base pairs. In another embodiment, the stuffer sequence is less than 3 kilobases, but larger than 100 base pairs. In one embodiment, the stuffer sequence is less than 1 kilobase, but larger than 10 base pairs. In another embodiment, the stuffer sequence is less than 1 kilobase, but larger than 50 base pairs. In another embodiment, the stuffer sequence is less than 1 kilobase, but larger than 80 base pairs. In another embodiment, the stuffer sequence is less than 1 kilobases, but larger than 100 base pairs. Examples of stuffer sequences are described in Table 36, and include nucleotides 124 to 1103 of SEQ ID NO: 855, 124 to 1100 of SEQ ID NOs: 844 to 849, and 132 to 1100 of SEQ ID NO: 850. Also included within the invention are nucleic acids having high homology to the stuffer sequences described herein, i.e., nucleic acid sequences that are 80%, 90%, 95%, 98%, or 99% identical to the stuffer sequences described herein.

[0238] In one embodiment, the stuffer sequence used in the vector of the invention contains certain restriction enzyme sites at the 5′, 3′ or both the 5′ and 3′ ends. Examples of such sites include, but are not limited to, NruI, FspAI, or a combination thereof at the 5′ end of the stuffer sequence and AfeI, SnaBI, BsiWI, HpaI, SalI, or a combination thereof at the 3′ end of the stuffer sequence. Stuffer sequences having advantageous restriction sites at the 5′ and 3′ ends are also described in FIG. 18.

[0239] Another important feature of the vector of the invention is that it contains heavy or light chain constant region sequences which may be operably linked to an insertion site for a nucleic acid encoding a variable chain region or another protein (e.g., to form an Fc fusion protein). The vector may contain any isotype of antibody, e.g., IgG, IgA, IgE, IgM, and IgD. In one embodiment, the constant region corresponds to a murine heavy or light chain sequence, including murine lambda, murine IgG2b, and murine IgG3. Alternatively, the constant region may be human, as described in the vector of Example 4. Examples of constant regions that may be used in the vector are described in Tables 36 and 37, as well as in the vectors described in SEQ ID NO: 844, SEQ ID NO: 845, SEQ ID NO: 846, SEQ ID NO: 847, SEQ ID NO: 848, SEQ ID NO: 849, SEQ ID NO: 850, SEQ ID NO: 851, SEQ ID NO: 852, SEQ ID NO: 853, SEQ ID NO: 854, and SEQ ID NO: 855.

[0240] In one embodiment, the vector comprises an episomal origin of replication which is an SV40 origin of replication. The SV40 (Simian Virus 40) origin of replication (described in FIG. 19) requires a single viral protein, the large T-antigen, for initiation of replication of the vector via this origin. The SV40 origin of replication may be used in episomal vectors to replicate and maintain said vector (see Calos (1996) Trends Genetics 12: 462; Harrison et al. (1994) J Virol 68:1913; Cooper et al. (1997) PNAS 94:6450; and Ascenziono et al. (1997) Cancer Lett 118:135).

[0241] In one embodiment, the vector of the invention may be used to express an Fc fusion protein. As used herein, the terms “linked,” “fused” or “fusion” are used interchangeably. These terms refer to the joining together of two more elements or components, by whatever means including chemical conjugation or recombinant means. An “in-frame fusion” or “operably linked” refers to the joining of two or more open reading frames (ORFs) to form a continuous longer ORF, in a manner that maintains the correct reading frame of the original ORFs. Thus, the resulting recombinant fusion protein is a single protein containing two or more segments that correspond to polypeptides encoded by the original ORFs (which segments are not normally so joined in nature.) Although the reading frame is thus made continuous throughout the fused segments, the segments may be physically or spatially separated by, for example, an in-frame linker sequence.

[0242] As used herein, the term “Fc region” includes amino acid sequences derived from the constant region of an antibody heavy chain. In some embodiments, an Fc region includes a polypeptide comprising the constant region of an antibody excluding the first constant region immunoglobulin domain.

[0243] The terms “Fc fusion” or “Fc fusion protein”, as used herein, include a protein wherein one or more proteins, polypeptides or small molecules is operably linked to an Fc region or derivative thereof. The term “Fc fusion” as used herein is intended to be synonymous with terms such as “Ig fusion”, “Ig chimera”, and “receptor globulin” (sometimes with dashes) as used in the prior art (Chamow et al., 1996, Trends Biotechnol 14:52-60; Ashkenazi et al., 1997, Curr Opin Immunol 9:195-200). An Fc fusion combines one or more Fc regions, or variant(s) thereof, of an immunoglobulin with a fusion partner, which in general can be any protein, polypeptide, peptide, or small molecule. In some embodiments, the role of the non-Fc part of an Fc fusion, i.e., the fusion partner, may be to mediate target binding, and thus it can be functionally analogous to the variable regions of an antibody.

[0244] Construction of vectors encoding antibodies according to the invention employs conventional ligation techniques. Isolated vectors or DNA fragments are cleaved, tailored, and religated in the form desired to generate the required vector. If desired, analysis to confirm that the correct sequences are present in the constructed vector can be performed in a known fashion. Suitable methods for constructing expression vectors, preparing in vitro transcripts, introducing DNA into host cells, and performing analyses for assessing expression and function are known to those skilled in the art. The presence of a gene sequence in a sample is detected, or its amplification and/or expression quantified by conventional methods, such as Southern or Northern analysis, Western blotting, dot blotting of DNA, RNA or protein, in situ hybridisation, immunocytochemistry or sequence analysis of nucleic acid or protein molecules. Those skilled in the art will readily envisage how these methods may be modified, if desired.

[0245] Techniques for determining nucleic acid and amino acid “sequence identity” also are known in the art. Typically, such techniques include determining the nucleotide sequence of the mRNA for a gene and/or determining the amino acid sequence encoded thereby, and comparing these sequences to a second nucleotide or amino acid sequence. In general, “identity” refers to an exact nucleotide-to-nucleotide or amino acid-to-amino acid correspondence of two polynucleotides or polypeptide sequences, respectively. Two or more sequences (polynucleotide or amino acid) can be compared by determining their “percent identity.” The percent identity of two sequences, whether nucleic acid or amino acid sequences, is the number of exact matches between two aligned sequences divided by the length of the shorter sequences and multiplied by 100. An approximate alignment for nucleic acid sequences is provided by the local homology algorithm of Smith and Waterman, Advances in Applied Mathematics 2:482-489 (1981). This algorithm can be applied to amino acid sequences by using the scoring matrix developed by Dayhoff, Atlas of Protein Sequences and Structure, M. O. Dayhoff ed., 5 suppl. 3:353-358, National Biomedical Research Foundation, Washington, D.C., USA, and normalized by Gribskov, Nucl. Acids Res. 14(6):6745-6763 (1986). An exemplary implementation of this algorithm to determine percent identity of a sequence is provided by the Genetics Computer Group (Madison, Wis.) in the “BestFit” utility application. The default parameters for this method are described in the Wisconsin Sequence Analysis Package Program Manual, Version 8 (1995) (available from Genetics Computer Group, Madison, Wis.). A preferred method of establishing percent identity in the context of the present invention is to use the MPSRCH package of programs copyrighted by the University of Edinburgh, developed by John F. Collins and Shane S. Sturrok, and distributed by IntelliGenetics, Inc. (Mountain View, Calif.). From this suite of packages the Smith-Waternan algorithm can be employed where default parameters are used for the scoring table (for example, gap open penalty of 12, gap extension penalty of one, and a gap of six). From the data generated the “Match” value reflects “sequence identity.” Other suitable programs for calculating the percent identity or similarity between sequences are generally known in the art.

[0246] Two nucleic acid fragments are considered to “selectively hybridize” as described herein. The degree of sequence identity between two nucleic acid molecules affects the efficiency and strength of hybridization events between such molecules. A partially identical nucleic acid sequence will at least partially inhibit a completely identical sequence from hybridizing to a target molecule. Inhibition of hybridization of the completely identical sequence can be assessed using hybridization assays that are well known in the art (e.g., Southern blot, Northern blot, solution hybridization, or the like, see Sambrook et al., 1989, Molecular Cloning: A Laboratory Manual, Cold Spring Harbor Laboratories, New York; or Ausubel et al. (Eds.), Current Protocols In Molecular Biology, John Wiley & Sons, Inc., New York (1997)). Such assays can be conducted using varying degrees of selectivity, for example, using conditions varying from low to high stringency. If conditions of low stringency are employed, the absence of non-specific binding can be assessed using a secondary probe that lacks even a partial degree of sequence identity (for example, a probe having less than about 30% sequence identity with the target molecule), such that, in the absence of non-specific binding events, the secondary probe will not hybridize to the target.

[0247] When utilizing a hybridization-based detection system, a nucleic acid probe is chosen that is complementary to a target nucleic acid sequence, and then by selection of appropriate conditions the probe and the target sequence “selectively hybridize,” or bind, to each other to form a hybrid molecule. A nucleic acid molecule that is capable of hybridizing selectively to a target sequence under “moderately stringent” typically hybridizes under conditions that allow detection of a target nucleic acid sequence of at least about 10-14 nucleotides in length having at least approximately 70% sequence identity with the sequence of the selected nucleic acid probe. Stringent hybridization conditions typically allow detection of target nucleic acid sequences of at least about 10-14 nucleotides in length having a sequence identity of greater than about 90-95% with the sequence of the selected nucleic acid probe. Hybridization conditions useful for probe/target hybridization where the probe and target have a specific degree of sequence identity, can be determined as is known in the art (see, for example, Nucleic Acid Hybridization: A Practical Approach, editors B. D. Hames and S. J. Higgins, (1985) Oxford; Washington, D.C.; IRL Press).

[0248] With respect to stringency conditions for hybridization, it is well known in the art that numerous equivalent conditions can be employed to establish a particular stringency by varying, for example, the following factors: the length and nature of probe and target sequences, base composition of the various sequences, concentrations of salts and other hybridization solution components, the presence or absence of blocking agents in the hybridization solutions (e.g., formamide, dextran sulfate, and polyethylene glycol), hybridization reaction temperature and time parameters, as well as, varying wash conditions. The selection of a particular set of hybridization conditions is selected following standard methods in the art (see, for example, see Sambrook, et al., supra or Ausubel et al., supra).

[0249] A first polynucleotide is “derived from” second polynucleotide if it has the same or substantially the same base pair sequence as a region of the second polynucleotide, its cDNA, complements thereof, or if it displays sequence identity as described above. A first polypeptide is “derived from” a second polypeptide if it is (i) encoded by a first polynucleotide derived from a second polynucleotide, or (ii) displays sequence identity to the second polypeptides as described above.

[0250] The invention also provides a kit containing one or more vectors of the invention in a suitable vessel such as a vial. The expression vectors can contain at least one cloning site for insertion of a selected sequence of interest, or can have a specific gene of interest already present in the vector. The vector an be provided in a dehydrated or lyophilized form, or in an aqueous solution. The kit can include a buffer for reconstituting the dehydrated polynucleotide. Other reagents can be included in the kit, e.g., reaction buffers, positive and negative control vectors for comparison. Generally, the kit will also include instructions for use of the reagents therein.

### Construction of IL-1 Dual-Specific Antibody: Selection of Main-Chain Conformation

[0251] The members of the immunoglobulin superfamily all share a similar fold for their polypeptide chain. For example, although antibodies are highly diverse in terms of their primary sequence, comparison of sequences and crystallographic structures has revealed that, contrary to expectation, five of the six antigen binding loops of antibodies (H1, H2, L1, L2, L3) adopt a limited number of main-chain conformations, or canonical structures (Chothia and Lesk (1987) J. Mol. Biol., 196: 901; Chothia et al. (1989) Nature, 342: 877). Analysis of loop lengths and key residues has therefore enabled prediction of the main-chain conformations of H1, H2, L1, L2 and L3 found in the majority of human antibodies (Chothia et al. (1992) J. Mol. Biol., 227: 799; Tomlinson et al. (1995) EMBO J., 14: 4628; Williams et al. (1996) J. Mol. Biol., 264: 220). Although the H3 region is much more diverse in terms of sequence, length and structure (due to the use of D segments), it also forms a limited number of main-chain conformations for short loop lengths which depend on the length and the presence of particular residues, or types of residue, at key positions in the loop and the antibody framework (Martin et al. (1996) J. Mol. Biol., 263: 800; Shirai et al. (1996) FEBS Letters, 399: 1).

[0252] The dual-specific antibodies of the present invention are advantageously assembled from libraries of domains, such as libraries of V_{H} domains and/or libraries of V_{L} domains. Moreover, the dual-specific antibodies of the invention may themselves be provided in the form of libraries. In one aspect of the present invention, libraries of dual-specific antibodies and/or domains are designed in which certain loop lengths and key residues have been chosen to ensure that the main-chain conformation of the members is known. Advantageously, these are real conformations of immunoglobulin superfamily molecules found in nature, to minimise the chances that they are non-functional, as discussed above. Germline V gene segments serve as one suitable basic framework for constructing antibody or T-cell receptor libraries; other sequences are also of use. Variations may occur at a low frequency, such that a small number of functional members may possess an altered main-chain conformation, which does not affect its function.

[0253] Canonical structure theory is also of use to assess the number of different main-chain conformations encoded by ligands, to predict the main-chain conformation based on antibody sequences and to choose residues for diversification which do not affect the canonical structure. It is known that, in the human Vκ domain, the L1 loop can adopt one of four canonical structures, the L2 loop has a single canonical structure and that 90% of human Vκ domains adopt one of four or five canonical structures for the L3 loop (Tomlinson et al. (1995) supra); thus, in the Vκ domain alone, different canonical structures can combine to create a range of different main-chain conformations. Given that the Vλ domain encodes a different range of canonical structures for the L1, L2 and L3 loops and that Vκ and Vλ domains can pair with any VH domain which can encode several canonical structures for the H1 and H2 loops, the number of canonical structure combinations observed for these five loops is very large. This implies that the generation of diversity in the main-chain conformation may be essential for the production of a wide range of binding specificities. However, by constructing an antibody library based on a single known main-chain conformation it has been found, contrary to expectation, that diversity in the main-chain conformation is not required to generate sufficient diversity to target substantially all antigens. Even more surprisingly, the single main-chain conformation need not be a consensus structure—a single naturally occurring conformation can be used as the basis for an entire library. Thus, in a preferred aspect, the dual-specific ligands of the invention possess a single known main-chain conformation.

[0254] The single main-chain conformation that is chosen is preferably commonplace among molecules of the immunoglobulin superfamily type in question. A conformation is commonplace when a significant number of naturally occurring molecules are observed to adopt it. Accordingly, in a preferred aspect of the invention, the natural occurrence of the different main-chain conformations for each binding loop of an immunoglobulin domain are considered separately and then a naturally occurring variable domain is chosen which possesses the desired combination of main-chain conformations for the different loops. If none is available, the nearest equivalent may be chosen. It is preferable that the desired combination of main-chain conformations for the different loops is created by selecting germline gene segments which encode the desired main-chain conformations. It is more preferable, that the selected germline gene segments are frequently expressed in nature, and most preferable that they are the most frequently expressed of all natural germline gene segments.

[0255] In designing dual-specific antibodies or libraries thereof the incidence of the different main-chain conformations for each of the six antigen binding loops may be considered separately. For H1, H2, L1, L2 and L3, a given conformation that is adopted by between 20% and 100% of the antigen binding loops of naturally occurring molecules is chosen. Typically, its observed incidence is above 35% (i.e. between 35% and 100%) and, ideally, above 50% or even above 65%. Since the vast majority of H3 loops do not have canonical structures, it is preferable to select a main-chain conformation which is commonplace among those loops which do display canonical structures. For each of the loops, the conformation which is observed most often in the natural repertoire is therefore selected. In human antibodies, the most popular canonical structures (CS) for each loop are as follows: H1--CS 1 (79% of the expressed repertoire), H2--CS 3 (46%), L1--CS 2 of Vκ (39%), L2--CS 1 (100%), L3--CS 1 of Vκ (36%) (calculation assumes a κ:λ ratio of 70:30, Hood et al. (1967) Cold Spring Harbor Symp. Quant. Biol., 48: 133). For H3 loops that have canonical structures, a CDR3 length (Kabat et al. (1991) Sequences of proteins of immunological interest, U.S. Department of Health and Human Services) of seven residues with a salt-bridge from residue 94 to residue 101 appears to be the most common. There are at least 16 human antibody sequences in the EMBL data library with the required H3 length and key residues to form this conformation and at least two crystallographic structures in the protein data bank which can be used as a basis for antibody modeling (2cgr and 1tet). The most frequently expressed germline gene segments that this combination of canonical structures are the VH segment 3-23 (DP-47), the JH segment JH4b, the Vκ segment 012/02 (DPK9) and the Jκ segment Jκ1. These segments can therefore be used in combination as a basis to construct a library with the desired single main-chain conformation.

[0256] Alternatively, instead of choosing the single main-chain conformation based on the natural occurrence of the different main-chain conformations for each of the binding loops in isolation, the natural occurrence of combinations of main-chain conformations is used as the basis for choosing the single main-chain conformation. In the case of antibodies, for example, the natural occurrence of canonical structure combinations for any two, three, four, five or for all six of the antigen binding loops can be determined. Here, it is preferable that the chosen conformation is commonplace in naturally occurring antibodies and most preferable that it observed most frequently in the natural repertoire. Thus, in human antibodies, for example, when natural combinations of the five antigen binding loops, H1, H2, L1, L2 and L3, are considered, the most frequent combination of canonical structures is determined and then combined with the most popular conformation for the H3 loop, as a basis for choosing the single main-chain conformation.

### Construction of IL-1 Dual-Specific Antibody: Diversification of the Canonical Sequence

[0257] Having selected several known main-chain conformations or, preferably a single known main-chain conformation, dual-specific antibodies according to the invention or libraries for use in the invention may be constructed by varying the binding site of the molecule in order to generate a repertoire with structural and/or functional diversity. This means that variants are generated such that they possess sufficient diversity in their structure and/or in their function so that they are capable of providing a range of activities.

[0258] The desired diversity is typically generated by varying the selected molecule at one or more positions. The positions to be changed can be chosen at random or are preferably selected. The variation can then be achieved either by randomisation, during which the resident amino acid is replaced by any amino acid or analogue thereof, natural or synthetic, producing a very large number of variants or by replacing the resident amino acid with one or more of a defined subset of amino acids, producing a more limited number of variants.

[0259] Various methods have been reported for introducing such diversity. Error-prone PCR (Hawkins et al. (1992) J. Mol. Biol., 226: 889), chemical mutagenesis (Deng et al. (1994) J. Biol. Chem., 269: 9533) or bacterial mutator strains (Low et al. (1996) J. Mol. Biol., 260: 359) can be used to introduce random mutations into the genes that encode the molecule. Methods for mutating selected positions are also well known in the art and include the use of mismatched oligonucleotides or degenerate oligonucleotides, with or without the use of PCR. For example, several synthetic antibody libraries have been created by targeting mutations to the antigen binding loops. The H3 region of a human tetanus toxoid-binding Fab has been randomised to create a range of new binding specificities (Barbas et al. (1992) Proc. Natl. Acad. Sci. USA, 89: 4457). Random or semi-random H3 and L3 regions have been appended to germline V gene segments to produce large libraries with unmutated framework regions (Hoogenboom & Winter (1992) J. Mol. Biol., 227: 381; Barbas et al. (1992) Proc. Natl. Acad. Sci. USA, 89: 4457; Nissim et al. (1994) EMBO J., 13: 692; Griffiths et al. (1994) EMBO J., 13: 3245; De Kruif et al. (1995) J. Mol. Biol., 248: 97). Such diversification has been extended to include some or all of the other antigen binding loops (Crameri et al. (1996) Nature Med., 2: 100; Riechmann et al. (1995) Bio/Technology, 13: 475; Morphosys, WO97/08320, supra). Other methods for naïve library diversification are described in WO2005/093074 and WO2004/003019.

[0260] Since loop randomisation has the potential to create approximately more than 1015 structures for H3 alone and a similarly large number of variants for the other five loops, it is not feasible using current transformation technology or even by using cell free systems to produce a library representing all possible combinations. For example, in one of the largest libraries constructed to date, 6×10¹⁰ different antibodies, which is only a fraction of the potential diversity for a library of this design, were generated (Griffiths et al. (1994) supra).

[0261] In a preferred embodiment, only those residues which are directly involved in creating or modifying the desired function of the molecule are diversified. For many molecules, the function will be to bind a target and therefore diversity should be concentrated in the target binding site, while avoiding changing residues which are crucial to the overall packing of the molecule or to maintaining the chosen main-chain conformation.

### Construction of IL-1 Dual-Specific Antibody: Diversification of the Canonical Sequence as it Applies to Antibody Domains

[0262] In the case of dual-specific antibodies, the binding site for the target is most often the antigen binding site. Thus, in a highly preferred aspect, the invention provides libraries of or for the assembly of dual-specific antibodies in which only those residues in the antigen binding site are varied. These residues are extremely diverse in the human antibody repertoire and are known to make contacts in high-resolution antibody/antigen complexes. For example, in L2 it is known that positions 50 and 53 are diverse in naturally occurring antibodies and are observed to make contact with the antigen. In contrast, the conventional approach would have been to diversify all the residues in the corresponding Complementarity Determining Region (CDR1) as defined by Kabat et al. (1991, supra), some seven residues compared to the two diversified in the library for use according to the invention. This represents a significant improvement in terms of the functional diversity required to create a range of antigen binding specificities.

[0263] In nature, antibody diversity is the result of two processes: somatic recombination of germline V, D and J gene segments to create a naive primary repertoire (so called germline and junctional diversity) and somatic hypermutation of the resulting rearranged V genes. Analysis of human antibody sequences has shown that diversity in the primary repertoire is focused at the centre of the antigen binding site whereas somatic hypermutation spreads diversity to regions at the periphery of the antigen binding site that are highly conserved in the primary repertoire (see Tomlinson et al. (1996) J. Mol. Biol., 256: 813). This complementarity has probably evolved as an efficient strategy for searching sequence space and, although apparently unique to antibodies, it can easily be applied to other polypeptide repertoires. The residues which are varied are a subset of those that form the binding site for the target. Different (including overlapping) subsets of residues in the target binding site are diversified at different stages during selection, if desired.

[0264] In the case of an antibody repertoire, an initial ‘naive’ repertoire is created where some, but not all, of the residues in the antigen binding site are diversified. As used herein in this context, the term “naive” refers to antibody molecules that have no pre-determined target. These molecules resemble those which are encoded by the immunoglobulin genes of an individual who has not undergone immune diversification, as is the case with fetal and newborn individuals, whose immune systems have not yet been challenged by a wide variety of antigenic stimuli. This repertoire is then selected against a range of antigens or epitopes. If required, further diversity can then be introduced outside the region diversified in the initial repertoire. This matured repertoire can be selected for modified function, specificity or affinity.

[0265] Two different naive repertoires of binding domains may be used for the construction of dual-specific ligands, or a naive library of dual-specific antibodies, in which some or all of the residues in the antigen binding site are varied. The “primary” library mimics the natural primary repertoire, with diversity restricted to residues at the centre of the antigen binding site that are diverse in the germline V gene segments (germline diversity) or diversified during the recombination process (junctional diversity). Those residues which are diversified include, but are not limited to, H50, H52, H52a, H53, H55, H56, H58, H95, H96, H97, H98, L50, L53, L91, L92, L93, L94 and L96. In the “somatic” library, diversity is restricted to residues that are diversified during the recombination process (junctional diversity) or are highly somatically mutated). Those residues which are diversified include, but are not limited to: H31, H33, H35, H95, H96, H97, H98, L30, L31, L32, L34 and L96. All the residues listed above as suitable for diversification in these libraries are known to make contacts in one or more antibody-antigen complexes. Since in both libraries, not all of the residues in the antigen binding site are varied, additional diversity is incorporated during selection by varying the remaining residues, if it is desired to do so. It shall be apparent to one skilled in the art that any subset of any of these residues (or additional residues which comprise the antigen binding site) can be used for the initial and/or subsequent diversification of the antigen binding site.

[0266] In the construction of libraries for use in the invention, diversification of chosen positions is typically achieved at the nucleic acid level, by altering the coding sequence which specifies the sequence of the polypeptide such that a number of possible amino acids (all 20 or a subset thereof) can be incorporated at that position. Using the IUPAC nomenclature, the most versatile codon is NNK, which encodes all amino acids as well as the TAG stop codon. The NNK codon is preferably used in order to introduce the required diversity. Other codons which achieve the same ends are also of use, including the NNN codon, which leads to the production of the additional stop codons TGA and TAA.

[0267] A feature of side-chain diversity in the antigen binding site of human antibodies is a pronounced bias which favors certain amino acid residues. If the amino acid composition of the ten most diverse positions in each of the V_{H}, Vκand Vλ regions are summed, more than 76% of the side-chain diversity comes from only seven different residues, these being, serine (24%), tyrosine (14%), asparagine (11%), glycine (9%), alanine (7%), aspartate (6%) and threonine (6%). This bias towards hydrophilic residues and small residues which can provide main-chain flexibility probably reflects the evolution of surfaces which are predisposed to binding a wide range of antigens or epitopes and may help to explain the required promiscuity of antibodies in the primary repertoire.

[0268] Since it is preferable to mimic this distribution of amino acids, the distribution of amino acids at the positions to be varied preferably mimics that seen in the antigen binding site of antibodies. Such bias in the substitution of amino acids that permits selection of certain polypeptides (not just antibody polypeptides) against a range of target antigens is easily applied to any polypeptide repertoire. There are various methods for biasing the amino acid distribution at the position to be varied (including the use of tri-nucleotide mutagenesis, see WO97/08320), of which the preferred method, due to ease of synthesis, is the use of conventional degenerate codons. By comparing the amino acid profile encoded by all combinations of degenerate codons (with single, double, triple and quadruple degeneracy in equal ratios at each position) with the natural amino acid use it is possible to calculate the most representative codon. The codons (AGT)(AGC)T, (AGT)(AGC)C and (AGT)(AGC)(CT)—that is, DVT, DVC and DVY, respectively using IUPAC nomenclature—are those closest to the desired amino acid profile: they encode 22% serine and 11% tyrosine, asparagine, glycine, alanine, aspartate, threonine and cysteine. Preferably, therefore, libraries are constructed using either the DVT, DVC or DVY codon at each of the diversified positions.

[0269] Domains identified from library screening are then subjected to mutagenesis and further screened in order to produce and select variants with improved characteristics.

### IV. Uses of IL-1 Dual-Specific Antibody

[0270] Given their ability to bind to both IL-1α and IL-1β, the dual-specific antibodies, or portions thereof (including single domain antibodies identified in the process of making the dual-specific antibodies), of the invention can be used to detect IL-1α and/or IL-1β (e.g., in a biological sample, such as serum or plasma), using a conventional immunoassay, such as an enzyme linked immunosorbent assays (ELISA), an radioimmunoassay (RIA) or tissue immunohistochemistry. The invention provides a method for detecting IL-1α and/or IL-1β in a biological sample comprising contacting a biological sample with an antibody, or antibody portion, of the invention and detecting either the antibody (or antibody portion) bound to IL-1α and/or IL-1β or unbound antibody (or antibody portion), to thereby detect IL-1α and/or IL-1β in the biological sample. The antibody is directly or indirectly labeled with a detectable substance to facilitate detection of the bound or unbound antibody. Suitable detectable substances include various enzymes, prosthetic groups, fluorescent materials, luminescent materials and radioactive materials. Examples of suitable enzymes include horseradish peroxidase, alkaline phosphatase, β-galactosidase, or acetylcholinesterase; examples of suitable prosthetic group complexes include streptavidin/biotin and avidin/biotin; examples of suitable fluorescent materials include umbelliferone, fluorescein, fluorescein isothiocyanate, rhodamine, dichlorotriazinylamine fluorescein, dansyl chloride or phycoerythrin; an example of a luminescent material includes luminol; and examples of suitable radioactive material include 125I, 131I, 35S or 3H.

[0271] Alternative to labeling the antibody, IL-1α and/or IL-1β can be assayed in biological fluids by a competition immunoassay utilizing IL-1α and/or IL-1β standards labeled with a detectable substance and an unlabeled anti-IL-1α and/or anti-IL-1β antibody. In this assay, the biological sample, the labeled IL-1α and/or IL-1β standards and the anti-IL-1α and/or anti-IL-1β antibody are combined and the amount of labeled IL-1α and/or IL-1β standard bound to the unlabeled antibody is determined. The amount of IL-1α and/or IL-1β in the biological sample is inversely proportional to the amount of labeled IL-1α and/or IL-1β standard bound to the anti-IL-1α and/or anti-IL-1β antibody.

[0272] The dual-specific antibodies and antibody portions of the invention are capable of neutralizing IL-1α and IL-1β activity. Accordingly, the antibodies and antibody portions of the invention can be used to inhibit IL-1α and/or IL-1β activity, e.g., in a cell culture containing IL-1αand/or IL-1β, in human subjects. In one embodiment, the invention provides a method for inhibiting IL-1α and IL-1β activity comprising contacting IL-1α and IL-1β with an antibody or antibody portion of the invention such that IL-1α and IL-1β activity is inhibited. Preferably, the IL-1α and hIL-1β is human IL-1α and IL-1β. For example, in a cell culture containing, or suspected of containing hIL-1α and hIL-1β, an antibody or antibody portion of the invention can be added to the culture medium to inhibit hIL-1α and hIL-1β activity in the culture.

[0273] In another embodiment, the invention provides a method for inhibiting IL-1α and IL-1β activity in a subject suffering from a disorder in which that IL-1α and IL-1β activity is detrimental. The invention provides methods for inhibiting IL-1α and IL-1β activity in a subject suffering from such a disorder, which method comprises administering to the subject a dual-specificity antibody or antibody portion of the invention such that IL-1α and IL-1β activity in the subject is inhibited. Preferably, the IL-1α and IL-1β is human IL-1α and IL-1β and the subject is a human subject. An antibody of the invention can be administered to a human subject for therapeutic purposes. Moreover, an antibody of the invention can be administered to a non-human mammal expressing IL-1α and IL-1β with which the antibody binds for veterinary purposes or as an animal model of human disease. Regarding the latter, such animal models may be useful for evaluating the therapeutic efficacy of antibodies of the invention (e.g., testing of dosages and time courses of administration).

[0274] As used herein, the phrase “a disorder in which IL-1 activity is detrimental” or the phrase “a disorder in which IL-1α and IL-1β is detrimental,” is intended to include diseases and other disorders in which the presence of IL-1 (which encompasses both IL-1α and IL-1β) in a subject suffering from the disorder has been shown to be or is suspected of being either responsible for the pathophysiology of the disorder or a factor that contributes to a worsening of the disorder. Accordingly, a disorder in which IL-1 activity is detrimental is a disorder in which inhibition of IL-1 activity (i.e., either or both of IL-1α and IL-1β) is expected to alleviate the symptoms and/or progression of the disorder. Such disorders may be evidenced, for example, by an increase in the concentration of IL-1 in a biological fluid of a subject suffering from the disorder (e.g., an increase in the concentration of IL-1 in serum, plasma, synovial fluid, etc. of the subject), which can be detected, for example, using an anti-IL-1 antibody as described above.

[0275] Interleukin 1 plays a critical role in the pathology associated with a variety of diseases involving immune and inflammatory elements. These diseases include, but are not limited to, rheumatoid arthritis, osteoarthritis, juvenile chronic arthritis, Lyme arthritis, psoriatic arthritis, reactive arthritis, spondyloarthropathy, systemic lupus erythematosus, Crohn's disease, ulcerative colitis, inflammatory bowel disease, insulin dependent diabetes mellitus, thyroiditis, asthma, allergic diseases, psoriasis, dermatitis scleroderma, graft versus host disease, organ transplant rejection, acute or chronic immune disease associated with organ transplantation, sarcoidosis, atherosclerosis, disseminated intravascular coagulation, Kawasaki's disease, Grave's disease, nephrotic syndrome, chronic fatigue syndrome, Wegener's granulomatosis, Henoch-Schoenlein purpurea, microscopic vasculitis of the kidneys, chronic active hepatitis, uveitis, septic shock, toxic shock syndrome, sepsis syndrome, cachexia, infectious diseases, parasitic diseases, acquired immunodeficiency syndrome, acute transverse myelitis, Huntington's chorea, Parkinson's disease, Alzheimer's disease, stroke, primary biliary cirrhosis, hemolytic anemia, malignancies, heart failure, myocardial infarction, Addison's disease, sporadic, polyglandular deficiency type I and polyglandular deficiency type II, Schmidt's syndrome, adult (acute) respiratory distress syndrome, alopecia, alopecia greata, seronegative arthopathy, arthropathy, Reiter's disease, psoriatic arthropathy, ulcerative colitic arthropathy, enteropathic synovitis, chlamydia, yersinia and salmonella associated arthropathy, spondyloarthopathy, atheromatous disease/arteriosclerosis, atopic allergy, autoimmune bullous disease, pemphigus vulgaris, pemphigus foliaceus, pemphigoid, linear IgA disease, autoimmune haemolytic anaemia, Coombs positive haemolytic anaemia, acquired pernicious anaemia, juvenile pernicious anaemia, myalgic encephalitis/Royal Free Disease, chronic mucocutaneous candidiasis, giant cell arteritis, primary sclerosing hepatitis, cryptogenic autoimmune hepatitis, Acquired Immunodeficiency Disease Syndrome, Acquired Immunodeficiency Related Diseases, Hepatitis C, common varied immunodeficiency (common variable hypogammaglobulinaemia), dilated cardiomyopathy, female infertility, ovarian failure, premature ovarian failure, fibrotic lung disease, cryptogenic fibrosing alveolitis, post-inflammatory interstitial lung disease, interstitial pneumonitis, connective tissue disease associated interstitial lung disease, mixed connective tissue disease associated lung disease, systemic sclerosis associated interstitial lung disease, rheumatoid arthritis associated interstitial lung disease, systemic lupus erythematosus associated lung disease, dermatomyositis/polymyositis associated lung disease, Sjogren's disease associated lung disease, ankylosing spondylitis associated lung disease, vasculitic diffuse lung disease, haemosiderosis associated lung disease, drug-induced interstitial lung disease, radiation fibrosis, bronchiolitis obliterans, chronic eosinophilic pneumonia, lymphocytic infiltrative lung disease, postinfectious interstitial lung disease, gouty arthritis, autoimmune hepatitis, type-I autoimmune hepatitis (classical autoimmune or lupoid hepatitis), type-2 autoimmune hepatitis (anti-LKM antibody hepatitis), autoimmune mediated hypoglycaemia, type B insulin resistance with acanthosis nigricans, hypoparathyroidism, acute immune disease associated with organ transplantation, chronic immune disease associated with organ transplantation, osteoarthrosis, primary sclerosing cholangitis, psoriasis type 1, psoriasis type 2, idiopathic leucopaenia, autoimmune neutropaenia, renal disease NOS, glomerulonephritides, microscopic vasulitis of the kidneys, lyme disease, discoid lupus erythematosus, male infertility idiopathic or NOS, sperm autoimmunity, multiple sclerosis (all subtypes), sympathetic ophthalmia, pulmonary hypertension secondary to connective tissue disease, Goodpasture's syndrome, pulmonary manifestation of polyarteritis nodosa, acute rheumatic fever, rheumatoid spondylitis, Still's disease, systemic sclerosis, Sjorgren's syndrome, Takayasu's disease/arteritis, autoimmune thrombocytopaenia, idiopathic thrombocytopaenia, autoimmune thyroid disease, hyperthyroidism, goitrous autoimmune hypothyroidism (Hashimoto's disease), atrophic autoimmune hypothyroidism, primary myxoedema, phacogenic uveitis, primary vasculitis, vitiligo, diseases of the central nervous system (e.g., depression, schizophrenia, Alzheimers, Parkinsons, etc.), acute and chronic pain, and lipid imbalance. The human antibodies, and antibody portions of the invention can be used to treat humans suffering from autoimmune diseases, in particular those associated with inflammation, including, rheumatoid spondylitis, allergy, autoimmune diabetes, or autoimmune uveitis.

[0276] Preferably, the IL-1α and IL-1β dual-specific antibodies of the invention or antigen-binding portions thereof, are used to treat rheumatoid arthritis, Crohn's disease, multiple sclerosis, insulin dependent diabetes, mellitus and psoriasis.

[0277] An IL-1α and IL-1β dual-specific antibody, or antibody portion, of the invention also can be administered with one or more additional therapeutic agents useful in the treatment of autoimmune and inflammatory diseases.

[0278] It is understood that all of the above-mentioned IL1-related disorders include both the adult and juvenile forms of the disease where appropriate. It is also understood that all of the above-mentioned disorders include both chronic and acute forms of the disease.

[0279] Antibodies of the invention, or antigen binding portions thereof may be used alone or in combination to treat such diseases. It should be understood that the antibodies of the invention or antigen binding portion thereof can be used alone or in combination with an additional agent e.g., a therapeutic agent, said additional agent being selected by the skilled artisan for its intended purpose. For example, the additional agent can be a therapeutic agent art-recognized as being useful to treat the disease or condition being treated by the antibody of the present invention. The additional agent also can be an agent which imparts a beneficial attribute to the therapeutic composition e.g., an agent which effects the viscosity of the composition.

[0280] It should further be understood that the combinations which are to be included within this invention are those combinations useful for their intended purpose. The agents set forth below are illustrative for purposes and not intended to be limited. The combinations which are part of this invention can be the antibodies of the present invention and at least one additional agent selected from the lists below. The combination can also include more than one additional agent, e.g., two or three additional agents if the combination is such that the formed composition can perform its intended function.

[0281] Preferred combinations are non-steroidal anti-inflammatory drug(s) also referred to as NSAIDS which include drugs like ibuprofen and COX-2 inhibitors. Other preferred combinations are corticosteroids including prednisolone; the well known side-effects of steroid use can be reduced or even eliminated by tapering the steroid dose required when treating patients in combination with the anti-IL-1 antibodies of this invention. Non-limiting examples of therapeutic agents for rheumatoid arthritis with which an antibody, or antibody portion, of the invention can be combined include the following: cytokine suppressive anti-inflammatory drug(s) (CSAIDs); antibodies to or antagonists of other human cytokines or growth factors, for example, TNF, LT, IL-2, IL-6, IL-7, IL-8, IL-12, IL-15, IL-16, IL-18, EMAP-II, GM-CSF, FGF, and PDGF. Antibodies of the invention, or antigen binding portions thereof, can be combined with antibodies to cell surface molecules such as CD2, CD3, CD4, CD8, CD25, CD28, CD30, CD40, CD45, CD69, CD80 (B7.1), CD86 (B7.2), CD90, or their ligands including CD154 (gp39 or CD40L).

[0282] Preferred combinations of therapeutic agents may interfere at different points in the autoimmune and subsequent inflammatory cascade; preferred examples include TNF antagonists like chimeric, humanized or human TNF antibodies, D2E7 (adalimumab; PCT Publication No. WO 97/29131), CA2 (Remicade™), CDP 571, CDP 870, Thalidamide and soluble p55 or p75 TNF receptors, derivatives, thereof, (p75TNFR1gG (Enbrel™) or p55TNFR1gG (Lenercept), and also TNFα converting enzyme (TACE) inhibitors; similarly IL-1 inhibitors (Interleukin-1-converting enzyme inhibitors, IL-1RA etc.) may be effective for the same reason. Other preferred combinations include Interleukin 11. Yet another preferred combination are other key players of the autoimmune response which may act parallel to, dependent on or in concert with IL-1 function; especially preferred are IL-12 and/or IL-18 antagonists including IL-12 and/or IL-18 antibodies or soluble IL-12 and/or IL-18 receptors, or IL-12 and/or IL-18 binding proteins. It has been shown that IL-12 and IL-18 have overlapping but distinct functions and a combination of antagonists to both may be most effective. Yet another preferred combination are non-depleting anti-CD4 inhibitors. Yet other preferred combinations include antagonists of the co-stimulatory pathway CD80 (B7.1) or CD86 (B7.2) including antibodies, soluble receptors or antagonistic ligands.

[0283] The antibodies of the invention, or antigen binding portions thereof, may also be combined with agents, such as methotrexate, 6-MP, azathioprine sulphasalazine, mesalazine, olsalazine chloroquinine/hydroxychloroquine, pencillamine, aurothiomalate (intramuscular and oral), azathioprine, cochicine, corticosteroids (oral, inhaled and local injection), beta-2 adrenoreceptor agonists (salbutamol, terbutaline, salmeteral), xanthines (theophylline, aminophylline), cromoglycate, nedocromil, ketotifen, ipratropium and oxitropium, cyclosporin, FK506, rapamycin, mycophenolate mofetil, leflunomide, NSAIDs, for example, ibuprofen, corticosteroids such as prednisolone, phosphodiesterase inhibitors, adensosine agonists, antithrombotic agents, complement inhibitors, adrenergic agents, agents which interfere with signaling by proinflammatory cytokines such as TNFα or IL-1 (e.g. IRAK, NIK, IKK, p38 or MAP kinase inhibitors), IL-1β converting enzyme inhibitors, TNFα converting enzyme (TACE) inhibitors, T-cell signalling inhibitors such as kinase inhibitors, metalloproteinase inhibitors, sulfasalazine, azathioprine, 6-mercaptopurines, angiotensin converting enzyme inhibitors, soluble cytokine receptors and derivatives thereof (e.g. soluble p55 or p75 TNF receptors and the derivatives p75TNFRIgG (Enbrel™ and p55TNFRIgG (Lenercept)), sIL-1RI, sIL-1RII, sIL-6R) and antiinflammatory cytokines (e.g. IL-4, IL-10, IL-11, IL-13 and TGF β). Preferred combinations include methotrexate or leflunomide and in moderate or severe rheumatoid arthritis cases, cyclosporine.

[0284] Non-limiting examples of therapeutic agents for inflammatory bowel disease with which an antibody, or antibody portion, of the invention can be combined include the following: budenoside; epidermal growth factor; corticosteroids; cyclosporin, sulfasalazine; aminosalicylates; 6-mercaptopurine; azathioprine; metronidazole; lipoxygenase inhibitors; mesalamine; olsalazine; balsalazide; antioxidants; thromboxane inhibitors; IL-1 receptor antagonists; anti-IL-1β monoclonal antibodies; anti-IL-6 monoclonal antibodies; growth factors; elastase inhibitors; pyridinyl-imidazole compounds; antibodies to or antagonists of other human cytokines or growth factors, for example, TNF, LT, IL-2, IL-6, IL-7, IL-8, IL-12, IL-15, IL-16, IL-18, EMAP-II, GM-CSF, FGF, and PDGF. Antibodies of the invention can be combined with antibodies to cell surface molecules such as CD2, CD3, CD4, CD8, CD25, CD28, CD30, CD40, CD45, CD69, CD90 or their ligands. The antibodies of the invention, or antigen binding portions thereof, may also be combined with agents, such as methotrexate, cyclosporin, FK506, rapamycin, mycophenolate mofetil, leflunomide, NSAIDs, for example, ibuprofen, corticosteroids such as prednisolone, phosphodiesterase inhibitors, adenosine agonists, antithrombotic agents, complement inhibitors, adrenergic agents, agents which interfere with signalling by proinflammatory cytokines such as TNFα or IL-1 (e.g. IRAK, NIK, IKK, p38 or MAP kinase inhibitors), IL-1β converting enzyme inhibitors, TNFβ converting enzyme inhibitors, T-cell signalling inhibitors such as kinase inhibitors, metalloproteinase inhibitors, sulfasalazine, azathioprine, 6-mercaptopurines, angiotensin converting enzyme inhibitors, soluble cytokine receptors and derivatives thereof (e.g. soluble p55 or p75 TNF receptors, sIL-1RI, sIL-1RII, sIL-6R) and antiinflammatory cytokines (e.g. IL4, IL-10, IL-11, IL-13 and TGFβ).

[0285] Preferred examples of therapeutic agents for Crohn's disease in which an antibody or an antigen binding portion can be combined include the following: TNF antagonists, for example, anti-TNF antibodies, D2E7 (adalimumab; PCT Publication No. WO 97/29131), CA2 (Remicade™), CDP 571, TNFR-Ig constructs, (p75TNFRIgG (Enbrel™) and p55TNFRIgG (Lenercept)) inhibitors and PDE4 inhibitors. Antibodies, or antigen binding portions thereof, of the invention or antigen binding portions thereof, can be combined with corticosteroids, for example, budenoside and dexamethasone, Antibodies of the invention or antigen binding portions thereof, may also be combined with agents such as sulfasalazine, 5-aminosalicylic acid and olsalazine, and agents which interfere with synthesis or action of proinflammatory cytokines such as IL-1, for example, IL-1β converting enzyme inhibitors and IL-1ra. Antibodies of the invention or antigen binding portion thereof may also be used with T cell signaling inhibitors, for example, tyrosine kinase inhibitors 6-mercaptopurines. Antibodies of the invention or antigen binding portions thereof, can be combined with IL-11.

[0286] Non-limiting examples of therapeutic agents for multiple sclerosis with which an antibody, or antibody portion, of the invention can be combined include the following: corticosteroids; prednisolone; methylprednisolone; azathioprine; cyclophosphamide; cyclosporine; methotrexate; 4-aminopyridine; tizanidine; interferon-β1a (Avonex; Biogen); interferon-β1b (Betaseron; Chiron/Berlex); Copolymer 1 (Cop-1; Copaxone; Teva Pharmaceutical Industries, Inc.); hyperbaric oxygen; intravenous immunoglobulin; clabribine; antibodies to or antagonists of other human cytokines or growth factors, for example, TNF, LT, IL-2, IL-6, IL-7, IL-8, IL-12, IL-15, IL-16, IL-18, EMAP-II, GM-CSF, FGF, and PDGF. Antibodies of the invention, or antigen binding portions thereof, can be combined with antibodies to cell surface molecules such as CD2, CD3, CD4, CD8, CD25, CD28, CD30, CD40, CD45, CD69, CD80, CD86, CD90 or their ligands. The antibodies of the invention, or antigen binding portions thereof, may also be combined with agents, such as methotrexate, cyclosporine, FK506, rapamycin, mycophenolate mofetil, leflunomide, NSAIDs, for example, ibuprofen, COX-2 inhibitors, corticosteroids such as prednisolone, phosphodiesterase inhibitors, adensosine agonists, antithrombotic agents, complement inhibitors, adrenergic agents, agents which interfere with signalling by proinflammatory cytokines such as TNFα or IL-1 (e.g. IRAK, NIK, IKK, p38 or MAP kinase inhibitors), IL-1β converting enzyme inhibitors, TACE inhibitors, T-cell signalling inhibitors such as kinase inhibitors, metalloproteinase inhibitors, sulfasalazine, azathioprine, 6-mercaptopurines, angiotensin converting enzyme inhibitors, soluble cytokine receptors and derivatives thereof (e.g. soluble p55 or p75 TNF receptors, sIL-1RI, sIL-1RII, sIL-6R) and antiinflammatory cytokines (e.g. IL4, IL-10, IL-13 and TGFβ).

[0287] Preferred examples of therapeutic agents for multiple sclerosis in which the antibody or antigen binding portion thereof can be combined to include interferon-β, for example, IFNβ1a and IFNβ1b; copaxone, corticosteroids, IL-1 inhibitors, TNF inhibitors, and antibodies to CD40 ligand and CD80.

### IV. Pharmaceutical Compositions and Pharmaceutical Administration

[0288] The compositions of this invention may be in a variety of forms. These include, for example, liquid, semi-solid and solid dosage forms, such as liquid solutions (e.g., injectable and infusible solutions), dispersions or suspensions, tablets, pills, powders, liposomes and suppositories. The preferred form depends on the intended mode of administration and therapeutic application. Typical preferred compositions are in the form of injectable or infusible solutions, such as compositions similar to those used for passive immunization of humans with other antibodies. The preferred mode of administration is parenteral (e.g., intravenous, subcutaneous, intraperitoneal, intramuscular). In a preferred embodiment, the antibody is administered by intravenous infusion or injection. In another preferred embodiment, the antibody is administered by intramuscular or subcutaneous injection.

[0289] Therapeutic compositions typically must be sterile and stable under the conditions of manufacture and storage. The composition can be formulated as a solution, microemulsion, dispersion, liposome, or other ordered structure suitable to high drug concentration. Sterile injectable solutions can be prepared by incorporating the active compound (i.e., antibody or antibody portion) in the required amount in an appropriate solvent with one or a combination of ingredients enumerated above, as required, followed by filtered sterilization. Generally, dispersions are prepared by incorporating the active compound into a sterile vehicle that contains a basic dispersion medium and the required other ingredients from those enumerated above. In the case of sterile, lyophilized powders for the preparation of sterile injectable solutions, the preferred methods of preparation are vacuum drying and spray-drying that yields a powder of the active ingredient plus any additional desired ingredient from a previously sterile-filtered solution thereof.

[0290] The proper fluidity of a solution can be maintained, for example, by the use of a coating such as lecithin, by the maintenance of the required particle size in the case of dispersion and by the use of surfactants. Prolonged absorption of injectable compositions can be brought about by including in the composition an agent that delays absorption, for example, monostearate salts and gelatin.

[0291] The antibodies and antibody-portions of the present invention can be administered by a variety of methods known in the art, although for many therapeutic applications, the preferred route/mode of administration is subcutaneous injection, intravenous injection or infusion. As will be appreciated by the skilled artisan, the route and/or mode of administration will vary depending upon the desired results. In certain embodiments, the active compound may be prepared with a carrier that will protect the compound against rapid release, such as a controlled release formulation, including implants, transdermal patches, and microencapsulated delivery systems. Biodegradable, biocompatible polymers can be used, such as ethylene vinyl acetate, polyanhydrides, polyglycolic acid, collagen, polyorthoesters, and polylactic acid. Many methods for the preparation of such formulations are patented or generally known to those skilled in the art. See, e.g., Sustained and Controlled Release Drug Delivery Systems, J. R. Robinson, ed., Marcel Dekker, Inc., New York, 1978.

[0292] In certain embodiments, an antibody or antibody portion of the invention may be orally administered, for example, with an inert diluent or an assimilable edible carrier. The compound (and other ingredients, if desired) may also be enclosed in a hard or soft shell gelatin capsule, compressed into tablets, or incorporated directly into the subject's diet. For oral therapeutic administration, the compounds may be incorporated with excipients and used in the form of ingestible tablets, buccal tablets, troches, capsules, elixirs, suspensions, syrups, wafers, and the like. To administer a compound of the invention by other than parenteral administration, it may be necessary to coat the compound with, or co-administer the compound with, a material to prevent its inactivation.

[0293] Supplementary active compounds can also be incorporated into the compositions. In certain embodiments, an antibody or antibody portion of the invention is coformulated with and/or coadministered with one or more additional therapeutic agents that are useful for treating disorders in which IL-1 activity is detrimental. For example, an anti-hIL-1 antibody or antibody portion of the invention may be coformulated and/or coadministered with one or more additional antibodies that bind other targets (e.g., antibodies that bind other cytokines or that bind cell surface molecules). Furthermore, one or more antibodies of the invention may be used in combination with two or more of the foregoing therapeutic agents. Such combination therapies may advantageously utilize lower dosages of the administered therapeutic agents, thus avoiding possible toxicities or complications associated with the various monotherapies. It will be appreciated by the skilled practitioner that when the antibodies of the invention are used as part of a combination therapy, a lower dosage of antibody may be desirable than when the antibody alone is administered to a subject (e.g., a synergistic therapeutic effect may be achieved through the use of combination therapy which, in turn, permits use of a lower dose of the antibody to achieve the desired therapuetic effect).

[0294] The pharmaceutical compositions of the invention may include a “therapeutically effective amount” or a “prophylactically effective amount” of an antibody or antibody portion of the invention. A “therapeutically effective amount” refers to an amount effective, at dosages and for periods of time necessary, to achieve the desired therapeutic result. A therapeutically effective amount of the antibody or antibody portion may vary according to factors such as the disease state, age, sex, and weight of the individual, and the ability of the antibody or antibody portion to elicit a desired response in the individual. A therapeutically effective amount is also one in which any toxic or detrimental effects of the antibody or antibody portion are outweighed by the therapeutically beneficial effects. A “prophylactically effective amount” refers to an amount effective, at dosages and for periods of time necessary, to achieve the desired prophylactic result. Typically, since a prophylactic dose is used in subjects prior to or at an earlier stage of disease, the prophylactically effective amount will be less than the therapeutically effective amount.

[0295] Dosage regimens may be adjusted to provide the optimum desired response (e.g., a therapeutic or prophylactic response). For example, a single bolus may be administered, several divided doses may be administered over time or the dose may be proportionally reduced or increased as indicated by the exigencies of the therapeutic situation. It is especially advantageous to formulate parenteral compositions in dosage unit form for ease of administration and uniformity of dosage. Dosage unit form as used herein refers to physically discrete units suited as unitary dosages for the mammalian subjects to be treated; each unit containing a predetermined quantity of active compound calculated to produce the desired therapeutic effect in association with the required pharmaceutical carrier. The specification for the dosage unit forms of the invention are dictated by and directly dependent on (a) the unique characteristics of the active compound and the particular therapeutic or prophylactic effect to be achieved, and (b) the limitations inherent in the art of compounding such an active compound for the treatment of sensitivity in individuals.

[0296] An exemplary, non-limiting range for a therapeutically or prophylactically effective amount of an antibody or antibody portion of the invention is 0.1-20 mg/kg, more preferably 1-10 mg/kg. It is to be noted that dosage values may vary with the type and severity of the condition to be alleviated. It is to be further understood that for any particular subject, specific dosage regimens should be adjusted over time according to the individual need and the professional judgment of the person administering or supervising the administration of the compositions, and that dosage ranges set forth herein are exemplary only and are not intended to limit the scope or practice of the claimed composition.

[0297] The contents of all references, patents and published patent applications cited throughout this application are incorporated herein by reference

[0298] This invention is further illustrated by the following examples which should not be construed as limiting.

### EXAMPLES

[0299] The following examples describes methods and compositions for making a dual-specific antibody which is specific for and can neutralize both IL-1α and IL-1β. The following examples detail how to select IL-1α and IL-1β domain antibodies (dAbs), how to affinity mature the identified dAbs to improve desired characteristics (affinity and neutralization properties), and how to construct a dual-specific antibody which retains the affinity and neutralization properties of the parent antibody.

[0300] For each clone described herein, the first part of the name relates to its specificity (IL-1α represented by ABT1; and IL-1β represented by ABT2), followed by the first number which relates to the lineage from which that clone is derived and a second number which is the unique identifier for that clone.

### Example 1

### Selection of IL-1α and IL-1β Domain Antibodies

[0301] Human phage antibody libraries containing either variable heavy or variable light single human frameworks were used in the screen to identify specific IL-1α and IL-1β domain antibodies (dAbs).

[0302] The dAb libraries used in the screen were based on the DP47 or DPk9 germline sequences, i.e., a single human framework for VH (V3-23 [locus] DP47 [V Base Entry] and JH4b) and V_{L} (012/02 [locus] DPκ9 [V Base Entry] and Jκ1) with side chain diversity incorporated at positions in the antigen binding site that make contacts with antigen in known molecular structures. Importantly, these positions are also highly diverse in the mature repertoire. The canonical structure (VH: 1-3, VL: 2-1-1) encoded by these frameworks are the most common in the human antibody repertoire. The CDR3 of the heavy chain was designed to be as short as possible yet still able to form an antigen binding surface. The libraries were selected and affinity matured without knowing the sequence of selected clones.

[0303] The library format used was dAb displayed on phage (single or multiple copies of a human variable VH or Vκ domain displayed on a phage virus particle as gene III fusions). The VH library size was 1.6×10¹⁰ and the Vκ library size was 1.7×10¹⁰. The libraries were phage libraries; therefore all the genes required to generate functional phage plus the geneIII-dab gene fusion were encoded on the phage vector (pDOM4 vector).

[0304] Three selection rounds were performed with clones screened from the outputs of selections rounds 2 and 3. Selection type was in solution using biotinylated antigen. Increase in phage output titre was used as an indication of specific phage enrichment during the selection rounds. Monoclonal phage were tested at rounds 2 and 3 for binding to antigen coated or captured by ELISA prior to screening the soluble dAb from these selection outputs. There were no antibody positive controls used during initial screening; however MAb200 and MAb201 were used as positive inhibiting IgG in the functional cell assay. Each single domain antibody was chosen by binding of a phage repertoire to the antigen, i.e., either human IL-1α or human IL-1β. Variable heavy and variable light dabs to both IL-1α and IL-1β were identified.

[0305] DNA purification was by QIAprep Spin Miniprep Kit; QIAfilter Plasmid Midi Kit or QIAfilter Plasmid Maxi Kit as appropriate for the amount of DNA required (kits by QIAGEN Ltd., QIAGEN House, Fleming Way, Crawley, West Sussex, RH10 9NQ), using the standard protocols supplied with the kits.

[0306] Sequences of the single domain antibodies (dabs) identified in the screen are described in Table 60.

### Example 2

### Affinity maturation of IL-1α/IL-1β Domain Antibodies (dAbs)

[0307] Affinity maturation of the dAbs identified in the library screen described in Example 1 was performed using different affinity maturation processes, as described below.

### 21.1. Emulsion Affinity Maturation of IL-1α Dab ABT1-95

[0308] Overview. One of the domain antibodies identified in the library screen, i.e., ABT1-95, was affinity matured by Emulsion selection, improving neutralization from an ND₅₀ of 1 μM to an ND₅₀ of 50 pM for ABT1-95-15. This process of affinity maturation was done in three incremental stages. In the first stage, two ABT1-95 derived clones were isolated: ABT1-95-1 and ABT1-95-2. By recombining these two mutants the clone ABT1-95-3 was created and was determined to have an ND₅₀ of 50 nM. Four libraries, each mutating four positions at a time with NNS diversification (wherein N=nucleotides A/T/C/G and S=nucleotides G or C) targeting either CDR1 (2×), CDR2/3, and CDR3 were created from ABT1-95-3. In addition to these libraries an error prone library was made. After selection in emulsions nine clones were identified with improved binding and ND₅₀ values of about 1 nM. Analysis of the best clones identified positions 30, 31, 55, and 56 as being highly relevant for high affinity binding. Selections from an NNS library specifically targeting these positions yielded three clones with ND₅₀'s in the 50-250 pM range: ABT1-95-13, ABT1-95-14 and ABT1-95-15.

### Detailed Description of Isolation Process for ABT1-95-15

[0309] Two ABT1-95 derived dAbs (Y88H named ABT1-95-1 (which contained a Y88H mutation), and a mutant that contained the same CDR2 as ABT1-141 named ABT1-95-2) were isolated from an ABT1-122 library selection. As shown in the table below, both clones had moderate increases in affinity over the parental ABT1-95. However, when these changes were combined by site directed mutagenesis, the new clone, ABT1-95-3, showed a marked increase in affinity (7-12 nM). Below are the BIAcore kinetics using an IL-1α coated chip with purified dAb flowed over the surface.

TABLE 1
BIAcore kinetics summary

| | kon | koff | Kd (nM) |
|---|---|---|---|
| ABT1-122 | 2.9-6.2 × 10e⁵ | 0.025 | 40-86 |
| ABT1-95-1 | 3.6-6.6 × 10e⁵ | 0.013-0.015 | 20-42 |
| ABT1-95-2 | 2.3-2.4 × 10e⁵ | 7.6-9.6 × 10e−3 | 32-42 |
| ABT1-95-3 | 4.7-6.4 × 10e⁵ | 4.7-5.7 × 10e−3 | 7-12 |

[0310] To create new affinity maturation libraries based on ABT1-95-3, new ‘signature’ templates were constructed. These templates contained unique restriction sites, which would no longer be present once libraries were constructed on the basis of these templates. This made it possible to remove selectively parental clones from the selection by restriction digest and focus on library-derived dAbs.

Four signature templates were constructed and verified by sequencing:

### 1) ABT1-95-3*: −BtsI+BamHI

### 2) ABT1-95-2*: −BtsI+BamHI

[0311] 3) ABT1-95-3*-k1: −BtsI+BamHI+KpnI after CDR1
4) ABT1-95-3*-k3: −BtsI+BamHI+KpnI after CDR3
These constructs were then used for construction of six libraries.
#1) CDR1-1: Pro Ile NNS NNS NNS Leu NNS with template ABT1-95-3*-k1
#2) CDR1-2: NNS NNS Ile His NNS NNS Leu Arg with template ABT1-95-3*-k1
#3) CDR2/3: NNS Ser Ser Ser NNS . . . NNS Tyr Arg Trp Pro NNS: with template ABT1-95-3*-k3
#4) 88+CDR3: NNS Cys NNS Gln NNS Tyr NNS Trp Pro Val with template ABT1-95-3*-k3
#5) Error-prone 1 with template ABT1-95-2*
#6) Error-prone 2 with template ABT1-95-3*

[0312] Diversity for libraries numbered 1-4 was complete, while for the error-prone libraries diversity exceeded 1×10⁸, which is higher than the diversity that can be assessed with emulsion. Error rates were about 2.5 nucleotide mutations per dAb. This was at the low end, but additional mutagenesis can be performed after e.g. 3 rounds of selection.

[0313] The six ABT1-95-3 libraries were subjected to nine rounds of emulsion selection. Libraries 1, 2, 3 and 4 went through 3 rounds of selection at relatively high IL-1α concentrations (50, 20, 10 nM), were then mixed 1:1:1:1, and subjected to 6 rounds of off-rate selection. During off-rate selection cold IL-1α concentration was increased from 300 to 1000 nM, while ‘hot’ IL-1a was kept at 10 nM. All off-rate selections were performed for short periods of time (i.e. 5-20 min.) and in the presence of free Ter operator (3 nM, 2000-fold excess) to limit rebinding of Tus-dAb complexes to non-corresponding DNA. Library 4 was also treated separately, and went through 7 rounds of selection using the same conditions as above. For the error-prone libraries, after each three rounds of selection an error-prone amplification step was introduced (using the GenemorphII mutagenesis kit). Error-prone libraries that had gone through both two and three rounds of mutagenesis were selected up to the ninth round. For additional details on emulsions using the TUS DNA-binding protein, see WO 06/046042A2, incorporated by reference herein, which describes the sequences of all oligonucleotides and vectors used herein.

[0314] After nine rounds, all dAbs were cloned into both pDOM-5 and Tus vectors and screening of individual clones has been initiated.

[0315] A total of 177 colonies isolated after nine round of selection (using Tus) on IL-1α were analysed: 72 colonies expressed dAbs (in pDOM5) with strong signals in ELISA on IL-1α. Following BIAcore analysis for off-rates, 33 dAbs showed a decreased off-rate when compared to ABT1-95-3: by sequencing, it was shown that the vast majority of these clones had unique sequences with mutations targeting primarily H30 and Q55. Further detailed analysis of 8 clones revealed Kd between 0.8 and 2.9 nM (Kd ABT1-95-3 is 5.4 nM) and ND50 values between 0.3 nM and 1 nM. ABT1 cell assay (100 pg/ml IL-1α) results are described in Table 62.

[0316] Further off-rate selections (3 rounds) with the pooled libraries did not yield improved clones: all the selected clones were identical to those already isolated at round 9 (ABT1-95-10 and ABT1-95-8).

[0317] Repeated prepping followed by cell assay reconfirmed that all ABT-95-3 derived variants (i.e. 954 through -12) had increased affinity for IL-1α. However, further affinity improvements were needed. Therefore, a next generation of affinity maturation was begun using ABT1-95-4, -8 and -12 as templates. Error-prone libraries were made of all three, while of ABT1-95-4 also a NNS library at positions 30, 31, 55, 56 was made. The latter was made by 3 fragment SOE because the distance between positions was too large to make a single oligonucleotide. All libraries were verified by sequencing, with the error-prone libraries having an average of 2.4 bp mutations/dAb. The NNS library was checked for parent by digestion with FspI, which demonstrated no visible parent on gel. In a first run, 6 rounds of selection were performed as noted below, the first value for NNS library, the second for the ep library.

round 1 20 nM, 10 nM
round 2 10 nM+4/10 min, 500 nM cold
round 3 10 nM+20/30 min, 750 nM cold
round 4 10 nM+60/75 min, 1600 nM cold

[0318] Output at this stage was digested with BtsI to remove a known contaminant. The NNS library was kept separate while the error-prone libraries were pooled.

round 5n 10 nM+60 min 750 nM cold
round 6n 10 nM+75 min 1 uM cold
round 7* 10 nM+105 min 1 uM cold
round 8* 10 nM+105 min 1 uM cold
round 9 10 nM+105 min 1 uM cold

[0319] This time the yield of recovery of the dAb PCR was better and maintained above 400 ng/well. Round 9 was recloned in pDOM5, transformed to MACH1 cells, and 96 supernatants were screened on BIAcore for off-rate. Only a small percentage (10%) of clones were inactive, 15% had off-rates significantly faster than parent, while 75% had off-rates of at least parent. A subset of clones didn't regenerate well, potentially indicating tighter binding. A total of 34 clones were taken further for purification and detailed analysis. Sequence analysis indicated clones to be diverse but focussed. Of these, 28 purified well and went into RBA (Receptor Binding Assay described below).

[0320] IL-1 Receptor Binding Assay. The majority was at least as good as ABT1-95-8 (1 nM), while 7 clones were better. These seven were tested in the cell assay and 6 out of 7 were better than 95-8. Summary of characterization is shown in Table 2 below. BIAcore was also performed on purified clones, but values were not very reliable, especially since the Koff values tend to be influenced by drift of the baseline.

TABLE 2
After round 9, pools were cloned in pDOM5 and screened

| | NNS | ep | Total |
|---|---|---|---|
| Colonies picked | 48 | 45 | 93 |
| BIAcore screen | | | |
| Inactive | 5 | 3 | 8 (9%) |
| faster off | 14 | 5 | 19 (20%) |
| off ≦ 95-8 | 29 | 37 | 66 (71%) |
| Purified | 18 | 16 | 34 |
| RBA | 7/28 better than 95-8 | | |
| MRC5 | 6/7 better than 95-8 | | |

Sequences, MRC5 data, and BIAcore for three best clones

| | | ND50 | kon | koff | KD |
|---|---|---|---|---|---|
| ABT1-95-13 | VR, ER | 120 pM | 2.00E+06 | 1.90E−03 | 9.50E−10 |
| | (30, 31, 55, | | | | |
| | 56) | | | | |
| ABT1-95-14 | VK, ER | 250 pM | 1.60E+06 | 1.90E−03 | 1.20E−09 |
| ABT1-95-15 | VR, EP | 45 pM | 2.00E+06 | 1.30E−03 | 6.70E−10 |

Detailed Description on how Emulsions Described Above were Performed
Library construction. Error-prone libraries: one pg of template DNA was PCR amplified using GenemorphII for 35 cycles with the primer set OA16/17n, followed by a restriction digest with SalI and NotI. The clean fragments were ligated in the vector pIE7t³T using T4 DNA ligase. Small aliquots of the ligation product were amplified in the presence of competitor DNA to establish that the number of ligation events exceeded 10⁹. The libraries were PCR amplified from the ligation reaction using Platinum pfx and primers AS12/18 (Tus libraries). For targeted diversification libraries, oligonucleotides containing NNS codons at the indicated positions were used and the dAb was assembled by overlap PCR. The assembly reaction was PCR amplified with OA16/17n oligonucleotides using PfuUltra DNA polymerase and cloned SalI/NotI in the respective IVT vector.

[0321] In vitro expression and emulsification. For in vitro transcription/translation of the library of PCR fragments the following reaction mixture was used: 1.5 μl 100 mM oxidized glutathione, 2 μl 5 mM Methionine, 0.5 μl DNA (5.0×10⁸ molecules), 10 μl H₂O, biotinylated antigen at varying concentrations, and 35 μl of EcoPro T7 (Novagen) coupled transcription-translation extract. Immediately after mixing, the extract was added to 0.7 ml of light white mineral oil containing 4.5% (v/v) Span-80 and 0.5% (v/v) Triton X-100. Emulsification was carried out by spinning a magnetic stirrer for 5 min at 2000 rpm in a 5 ml glass vial. Microscopic analysis of droplet formation confirmed that droplets were ˜2 μm in diameter. The emulsion was incubated for 60 min at 25° C. to allow expression and formation of the protein-DNA complex to take place. Breaking of the emulsion was performed by adding 0.25 ml of PBS/1% BSA/biotinylated antigen and 0.5 ml hexane/20% (v/v) mineral oil, followed by brief vortex and centrifugation for 1 min at 13 k rpm. After removal of the oil phase, 1 ml of hexane/mineral oil was added and the procedure repeated three times. The last extraction was performed using only hexane.

Selection and amplification. Selection for binders was performed by incubating the extracted aqueous phase for 30 min in the presence 50-5 nM of biotinylated antigen (See previous information for exact conditions used per round). If off-rate selections were performed, this incubation was followed by addition of an excess of unbiotinylated antigen and incubation in the 5-105 min range. Each emulsion reaction was then divided over 5 wells of a streptavidin coated PCR plate (50 μl well), incubated for 15 min at 25° C., and washed 4 times with PBS/BSA. Fifty μl of PCR mix containing either OA16/17n primers, PfuUltra buffer, dNTPs, 2.5 u PfuUltra DNA polymerase was added to each well. PCR was performed for 30 cycles. For Tus selections, the PCR product was cleaned and digested with SalI/NotI. The fragment was then ligated in pIE7t³T vector and amplified as described in library construction.

[0322] For additional details on emulsions using the TUS DNA-binding protein, see WO 06/046042A2, incorporated by reference herein, which describes the sequences of all oligonucleotides and vectors used.

Further affinity maturation of ABT-1-95-15

[0323] ABT1-95 was affinity matured by Emulsion selection from an ND₅₀ of 1 μM to an ND₅₀ of 50 pM for ABT1-95-15. This was done in three incremental stages, as described above. Generally, in the first stage, two ABT1-95 derived clones were isolated: ABT1-95-1 and ABT1-95-2. By recombining these two mutants the clone ABT1-95-3 was created and was determined to have an ND₅₀ of 50 nM.

[0324] Four libraries, each mutating four positions at a time with NNS (wherein N is nucleotide A, T, C, or G and S is a nucleotide G, or C) diversification targeting either CDR1 (2×), CDR2/3, and CDR3 were created from ABT1-95-3. In addition to these libraries an error prone library was made. After selection in emulsions nine clones were identified with improved binding and ND₅₀ values of about 1 nM. Analysis of the best clones identified positions 30, 31, 55, and 56 as being highly relevant for high affinity binding. Selections from an NNS library specifically targeting these positions yielded three clones with ND₅₀'s in the 50-250 pM range: ABT1-95-13, ABT1-95-15 and ABT1-95-15. ABT1-95-15 was then further matured using the parallel strategies of NNS screening and yeast display.

[0325] For the NNS screening, individual NNS libraries at every diversified position in each CDR (Q27, P28, V30, R31, N32, R34, Y49, S50, S51, Y53, E55, P56, Q89, G91, Y92, R93, W94, V96) were created and screened, with mutations that led to activity improvements combined to create ABT1-95-174 (ND₅₀ of 2 pM). ABT1-95-15 was also matured using yeast display with each CDR being individually diversified followed by sorting of the libraries using FACS, then recombination of the outputs followed by further sorting to create ABT1-95-A3, ABT1-95-A5, and ABT1-95-A6. Mutations from the NNS screen identified as potentially detrimental to neutralising activity were removed from ABT1-95-A3 and ABT1-95-A5 to create ABT1-95-181, ABT1-95-182 and ABT1-95-184. FIG. 21A and Table 3 show the changes in both sequence, neutralising activity and affinity that occurred as the maturation of ABT1-95 progressed.

TABLE 3
Summary of the activity improvements of ABT1-95 dAb clones as the
maturation program progressed

| Clone | MRC5 ND₅₀ | | K_{D} |
|---|---|---|---|
| ABT1-95 | 1 | μM | 200 nM |
| ABT1-95-1 | | | 40 nM |
| ABT1-95-2 | | | 40 nM |
| ABT1-95-3 | 50 | nM | 5-10 nM |
| ABT1-95-4 | 0.9 | nM | 0.9 nM |
| ABT1-95-8 | 0.9 | nM | 0.9 nM |
| ABT1-95-13 | 110 | pM | |
| ABT1-95-14 | 250 | pM | |
| ABT1-95-15 | 50-150 | pM | |
| ABT1-95-A3 | 11 | pM | |
| ABT1-95-A5 | 16 | pM | |
| ABT1-95-A6 | 24 | pM | |
| ABT1-95-174 | *1-5 | pM | |
| ABT1-95-181 | 14 | pM | |
| ABT1-95-182 | *1-5 | pM | |
| ABT1-95-184 | *1-5 | pM | |

*Exceeds sensitivity of the assay

### 2.1.2 Affinity Maturation of ABT1-122

[0326] ABT1-122 was affinity matured by phage display using both libraries diversified by using NNS codons in either CDR1, CDR2 or CDR3 and error-prone PCR with selection taking place under both equilibrium and off-rate conditions. Analyses of the outputs from these selections lead to the identification of ABT1-122-18 which has an ND₅₀ of 5 nM compared to the parental ND₅₀ of 50 nM.

[0327] Libraries, each diversified in blocks of three amino acids scanning across all three CDRs were constructed and sorted by FACS. This resulted in the lead clone ABT1-122-511 which has an ND₅₀ of 80 nM when paired with ABT2-108 as an IgG compared to a parental ND₅₀ of 1 μM for the same pairing. To mature this lead clone further, each CDR was again individually diversified followed by sorting of the libraries using FACS, then recombination of the outputs followed by further sorting to create ABT1-122-750X which has an ND₅₀ in the MRC5 assay as a dAb of 934 pM and ND₅₀ of 20 nM in the MRC5 assay when paired as an IgG with ABT2-65-17. FIG. 21B shows the sequences of clones ABT1-122 as maturation progressed. In addition to the sequences described in FIG. 21B (as well as Tables 60 and 64), clone ABT1-122-751x was also created (CDR1 RASQHIWTELN/CDR2GSASRQK/CDR3KQFAYYPNT). Table 4 below describes the inhibitory activity of the clones.

TABLE 4
Summary of the activity improvements of ABT1-122 dAb clones
as maturation has progressed

| Clone | MRC5 ND₅₀ |
|---|---|
| ABT1-122 | 50 nM |
| ABT1-122-18 | 5 nM |
| ABT1-122-511 | ND |
| ABT1-122-750X | 934 pM |

### 2.1.3 Affinity Maturation of ABT1-141

[0328] ABT1-141 was affinity matured by phage display using both libraries diversified using NNS codons in either CDR1, CDR2 or CDR3 and error-prone PCR with selection taking place under both equilibrium and off-rate conditions (FIG. 21C shows the sequences of the maturation process). Analyses of the outputs from these selections identified ABT1-141-25, which has an ND₅₀ of 5 nM compared to the parental ND₅₀ of 70 nM. An error-prone PCR library based on ABT1-141-25 resulted in ABT1-141-47 which had an improved ND₅₀ of 1 nM and ABT1-141-76 which has an identical ND₅₀ to ABT1-141-47 but with the added benefit of no framework mutations, compared to the germline DPK9/JK1 scaffold. Inhibitory activity of the identified clones are described in Table 5.

TABLE 5
Summary of the activity improvements of ABT1-141 dAb clones
as maturation has progressed

| Clone | MRC5 ND₅₀ |
|---|---|
| ABT1-141 | 70 nM |
| ABT1-141-25 | 5 nM |
| ABT1-141-47 | 1 nM |
| ABT1-141-76 | 1 nM |

### 2.1.4 Affinity Maturation of ABT2-65

[0329] ABT2-65 was affinity matured by phage display using both libraries diversified by using NNS codons in either CDR1, CDR2 or CDR3 and error-prone PCR with selection taking place under both equilibrium and off-rate conditions. A number of clones with improved activity in the MRC5 assay were identified from the library where the inner residues in CDR3 had been diversified, the best of which was ABT2-65-17 which has an ND₅₀ of 2 nM compared to 266 nM for the parental clone. One framework mutation and an N-linked glycosylation site were present in ABT2-65 and a further framework mutation was present in ABT2-65-17. These were all removed to create the clone ABT2-65-166. Clone sequences are described in FIG. 21D, and inhibitory activity is described in Table 6.

TABLE 6
Summary of the activity improvements of ABT2-65 dAb clones.

| Clone | MRC5 ND₅₀ |
|---|---|
| ABT2-65 | 266 nM |
| ABT2-65-17 | 2 nM |
| ABT2-65-166 | 4 nM |

### 2.2.1 Affinity Maturation of IL-1βdAb ABT2-108 by Yeast Display

[0330] Previously ABT2-108 was identified as an anti-human IL-1β VH dAb (see Table 60 and Example 1). ABT2-108 has ˜10-100 nM IL-1β neutralizing potency as a dAb and paired IgG. In order to improve the IL-1β neutralization potency to <200-pM, affinity maturation of ABT2-108 was performed in the scFv format by yeast display, using the small scanning library and CDR recombination methods.

[0331] The objective of the study was to affinity-mature ABT2-108 by yeast display in the scFv format by the use of small scanning CDR libraries and CDR recombination in order to obtain <200 pM IL-1β neutralization potency when converted into the paired IgG format.

### Materials and Methods

[0332] Construction of the scFv yeast expression vector. ABT2-108/ABT1-122 scFv was subcloned into pYDs-TEV vector by standard molecular cloning. The complete construct is shown in FIG. 1.

Construction of small CDR scanning libraries Gapped vectors for yeast recombination were generated by long PCR using the pYDs-TEV-2-108/1-122 plasmid as a template and 7 sets of gapped primer pairs (Table 7).

TABLE 7
Gapped Vector Primers

| | | |
|---|---|---|
| Gap | Forward | Reverse |

| | | |
|---|---|---|
| 1 | 2-108-Gap1Fwd | 2-108-Gap1Rev |
| | TGG GTC CGC CAG GCT CCA | AAA GGT GAA TCC GGA |
| | G | GGC TG |
| 2 | 2-108-Gap2Fwd | 2-108-Gap2Rev |
| | AAT ACA TAC TAC GCA GAC | TGA GAC CCA CTC GAG |
| | TCC GTG | ACC |
| 3 | 2-108-Gap3Fwd | 2-108-Gap3Rev |
| | GAC TCC GTG AAG GGC CGG | ATC CTG CCC AAT ACG |
| | | TGA G |
| 4 | 2-108-Gap4Fwd | 2-108-Gap4Rev |
| | CGG TTC ACC ATC TCC CGC | GTA TGT ATT CTT ACC |
| | | ATC CTG CCC |
| 5 | 2-108-Gap5Fwd | 2-108-Gap5Rev |
| | CAT CAT CTT TTT GAC TAC | TTT CGC ACA GTA ATA |
| | TGG GGT C | TAC CGC |
| 6 | 2-108-Gap6Fwd | 2-108-Gap6Rev |
| | GAC TAC TGG GGT CAG GGA | AAC CCG ACC CGT ATA |
| | AC | TTT CG |
| 7 | 2-108-Gap7Fwd | 2-108-Gap7Rev |
| | TGG GGT CAG GGA ACC CTG | ATG ATG AAC ACC AAC |
| | | CCG AC |

[0333] 30 long oligos were ordered that span the gaps, 4 for HCDR1, 15 for HCDR2, and 11 for HCDR3. Each oligo contained a series of 9 random nucleotides (NNSNNSNNS, S═C or G), and each subsequent oligo shifted the random sequence down by 3 nucleotides. Each generated library would then randomize only 3 consecutive amino acids, and this window of 3 amino acids would be walked across all 3 HDCRs. One oligo for HCDR1 randomized 3 non-consecutive amino acids. FIG. 2 shows the randomization of HCDRs in the 30 small libraries.

Yeast libraries generation. 30 small yeast libraries were generated via homologous recombination by co-transforming yeast (EBY100) with Gapped vectors and their respective long oligos.

[0334] Libraries output sizes were estimated by plating aliquots of transformed cells on SD(-UT) plates.

Yeast libraries labeling and sorting. Expression of scFv fragments on the surface of yeast was induced by growing libraries in SRG(-UT) medium for 48 hours at 20° C.

[0335] For library sorting 0.4 OD of yeast cells were labeled with antigen (human IL-1β) at a concentration of 6 nM followed by staining with detection antibody (biotinylated goat polyclonal anti-IL-1β antibody, R&D Systems, Cat# BAF201, at concentration 5 μg/ml) and then Streptavidin-PE (Jackson ImmunoResearch Laboratories, Inc, Cat #016-110-034). ScFv expression was determined by staining libraries with anti-V5 mAb (Invitrogen, Cat# R96025) followed by anti-mouse IgG-FITC (Molecular Probes, Cat # F11021).

[0336] Libraries were sorted on the Cytomation MoFlo for 2-3 rounds individually, and then for 1-2 rounds pooled into 6 groups, H1 #1-4, H2 #1-5, H2 #6-10, H2 #11-15, H3 #1-5, and H3 #6-11. For each round of sorting, the top ˜0.1% of cells were collected.

[0337] The outputs were analyzed for sequence diversity, and individual clones were assayed for IL-1β binding on the surface of yeast. The best clones were converted into IgG and tested for IL-1β neutralization potency in an MRC-5 assay.

[0338] A 2-108 recombination library was generated by amplifying the HCDR fragments from the best affinity matured clones as well as 2-108 parental for each CDR and then performing homologous recombination in yeast with all the fragments (FIG. 3). One round of sorting was performed on the recombination library using 2 different selection strategies, equilibrium sorting with 60 pM. IL-1β and on-rate sorting with 600 pM IL-1β for 20 minutes labeling. Both outputs were analyzed for sequence diversity, and individual clones were assayed for IL-1β binding on the surface of yeast. The best clones were converted into IgG and tested for IL-1β neutralization potency in a MRC-5 assay.

MRC-5 bioassay. The MRC-5 cell line is a human lung fibroblast cell line that produces IL-8 in response to human IL-1α and IL-1β in a dose-dependent manner. MRC-5 cells were originally obtained from ATCC and subcultured in 10% FBS complete MEM and grown at 37 C in a 5% CO2 incubator. To determine an antibody's neutralizing potency against IL-1α or IL-1b, 4× concentrated Ab (50 ul) was added to a 96 well plate and pre-incubated with 50 ul of 4× concentrated IL-1α or IL-1β for 1 hr at 37 C, 5% CO2. MRC-5 cells at a concentration of 1E5/ml were then added (100 ul) to all wells and the plates were incubated overnight at 37 C in a 5% CO2 incubator. Antibody potency was determined by its ability to inhibit IL-8 production. Human IL-8 production was measured by ELISA.

### Results

### ABT2-108 Affinity Maturation by Small Scanning CDR Libraries

[0339] Improved clones were identified from the selections for all 3 HCDRs, and designated ABT2-108-501 through 532 see Table 8).

TABLE 8
CDR sequences of parental and affinity matured 2-108 clones

| | | | |
|---|---|---|---|
| CDR1 | CDR2 | CDR3 | Clone# |

| | | | | |
|---|---|---|---|---|
| ABT-2108 | EYTMM | RIGQDGKNTYYADSVKG | YTGRVGVHHLFDY | WT |
| -501 | WEGMM | | | Apr. 9, 2004 H1-1 scFV R2 6 nM output #1 |
| -502 | MESMM | | | Apr. 30, 2004 H1-1~4 scFv pooled R3 6 nM output #1 |
| -503 | EEKWM | | | Apr. 30, 2004 H1-1~4 scFv pooled R3 6 nM output #2 |
| -504 | DEGMM | | | Apr. 30, 2004 H1-1~4 scPr pooled R3 6 nM output #3 |
| -505 | EYGLI | | | Apr. 30, 2004 H1-1~4 scFv pooled R3 6 nM output #9 |
| -506 | | RCHEDGKNTYYADSVKG | | Apr. 30, 2004 H2-1~5 scFv pooled R2 6 nM output #1 |
| -507 | | RITWTGKNTYYADSVKG | | Apr. 30, 2004 H2-1~5 scFv pooled R2 6 nM output #2 |
| -508 | | RIGYMDKNTYYADSVKG | | Apr. 30, 2004 H2-1~5 scFv pooled R2 6 nM output #4 |
| -509 | | RITYSGKNTYYADSVKG | | Apr. 30, 2004 H2-1~5 scFv pooled R2 6 nM output #5 |
| -510 | | RCVWDGKNTYYADSVKG | | Apr. 30, 2004 H2-1~5 scFv pooled R2 6 nM output #9 |
| -511 | | RIGQDGKNTVIRDSVKG | | Apr. 30, 2004 H2-6~10 scFv pooled R2 6 nM output #1 |
| -512 | | RIGQDGKNTVLRDSVKG | | Apr. 30, 2004 H2-6~10 scFv pooled R2 6 nM output #3 |
| -513 | | RIGQDGKNTVDRDSVKG | | Apr. 30, 2004 H2-6~10 scFv pooled R2 6 nM output #9 |
| -514 | | RIGQDGKNTWTRDSVKG | | Apr. 30, 2004 H2-6~10 scFv pooled R2 6 nM output #10 |
| -515 | | RIGQDGKNTYYRGYMKG | | May 3, 2004 H2-11~15 scFv pooled R2 6 nM output #1 |
| -516 | | RIGQDGKNTYYRVDVKG | | May 3, 2004 H2-11~15 scFv pooled R2 6 nM output #4 |
| -517 | | RIGQDGKNTYYADRTDG | | May 3, 2004 H2-11~15 scFv pooled R2 6 nM output #5 |
| -518 | | RIGQDGKNTYYRMDVKG | | May 3, 2004 H2-11~15 scFv pooled R2 6 nM output #6 |
| -519 | | RIGQDGKNTYARMSVKG | | May 3, 2004 H2-11~15 scFv pooled R2 6 nM output #8 |
| -520 | | RIGQDGKNTYYADRSFG | | May 3, 2004 H2-11~15 scFv pooled R2 6 nM output #9 |
| -521 | | | YTGRILGHHLFDY | Apr. 9, 2004 H3-5a scFv R2 6 nM output #1 |
| -522 | | | YTGRILHHHLFDY | May 3, 2004 H3-1~5 scFv pooled R2 6 nM output #1 |
| -523 | | | YDGWVGVHHLFDY | May 3, 2004 H3-1~5 scFv pooled R2 6 nM output #2 |
| -524 | | | YTGRVFNHHLFDY | May 3, 2004 H3-1~5 scFv pooled R2 6 nM output #6 |
| -525 | | | YTGRILAHHLFDY | May 3, 2004 H3-1~5 scEV pooled R2 6 nM output #9 |
| -526 | | | YTGRVLNHHLFDY | May 3, 2004 H3-6~11 scFv pooled R2 6 nM output #1 |
| -527 | | | YTGRVFKHHLFDY | May 3, 2004 H3-6~11 scFv pooled R2 6 nM output #3 |
| -528 | | | YTGRVLGHHLFDY | May 3, 2004 H3-6~11 scFv pooled R2 6 nM output #6 |
| -529 | EEGMM | | | May 14, 2004 H1-1~4 scFv pooled R4 2 nM output #1 |
| -530 | | | YTGRILEHHLFDY | May 14, 2004 H3-1~5 scFv pooled R3 2 nM output #1 |
| -531 | | | YTGRIFSHHLFDY | May 14, 2004 H3-1~5 scFv pooled R3 2 nM output #3 |
| -532 | | | YTGRIFLHHLFDY | May 14, 2004 H3-1~5 scFc pooled R3 2 nM output #5 |
| -533x | DEGMM | RIGQDGKNTYYADSVKG | YTGRILGHHLFDY | Aug. 3, 2004 2-108 scFv Recomb R1 s1 60 pM output #4 |
| -534x | DEGMM | RITYSGKNTYYADSVKG | YTGRIFSHHLFDY | Aug. 3, 2004 2-108 scFV Recomb R1 s1 60 pM output #9 |
| -535x | DEGMM | RIGQDGKNTYYADSVKG | YTGRIFSHHLFDY | Aug. 3, 2004 2-108 scFv Recomb R1 s1 60 pM output #10 |
| -536x | EEKWM | RIGQDGKNTYYADSVKG | YTGRILGHHLFDY | Aug. 3, 2004 2-108 scFv Recomb R1 s1 60 pM output #4 |
| -537x | DEGMM | RIGQDGKNTYYRMDVKG | YTGRILGHHLFDY | Aug. 3, 2004 2-108 scFv Recomb R1 20 min 600 pM output #2 |
| -538x | DEGMM | RITYSGKNTYYADSVKG | YTGRILGHHLFDY | Aug. 3, 2004 2-108 scFv Recomb R1 20 min 600 pM output #6 |

[0340] K_{D} curves on the surface of yeast for the clones in relation to 2-108 parental were generated, with the best clones showing 1-2 logs improvement in binding affinity (FIG. 4). EC50 values for the clones and wild type were as follows (clone name (EC50 value)): 2-108/1-122 WT (69.29); 504 (1.054); 509 (5.318); 511 (1.848); 518 (4.404); 522 (2.963); 524 (3.103); and 527 (2.596).

[0341] The best clones when converted into IgG format paired with ABT1-122 showed greater than 1 log improvement in IL-1β neutralization potency in a MRC-5 assay (FIG. 5).

### ABT2-108 Affinity Maturation by CDR Recombination Library

[0342] Both the equilibrium and on rate sorting produced several clones with improvement in IL-1β affinity over the single CDR affinity matured clones. Six of these clones were chosen for further analysis, designated ABT2-108-533X through 538X (see Table 9).

TABLE 9
Dual-specificity pairings and neutralization characteristics

| | | | IL-1α | IL-1β |
|---|---|---|---|---|
| | | | IC50 | IC50 |
| Name | Heavy Chain | Light Chain | (nM) | (nM) |
| ABT2-108/ABT1-122 hu IgG1/K | ABT2-108 | ABT1-122 | 150, | 15, 20, |
| wt | | | 500, | 40 |
| | | | 1500 | |
| ABT2-108-504/ABT1-122 hu | ABT2-108-504 | ABT1-122 | 1500 | 15 |
| IgG1/K wt | | | | |
| ABT2-108-518/ABT1-122 hu | ABT2-108-518 | ABT1-122 | 400 | 0.5 |
| IgG1/K wt | | | | |
| ABT2-108-521/ABT1-122 hu | ABT2-108-521 | ABT1-122 | 1000 | 0.2, 0.4 |
| IgG1/K wt | | | | |
| ABT2-108-533x/ABT1-122 hu | ABT2-108- | ABT1-122 | 1000 | 0.025, |
| IgG1/K wt | 533x | | | 0.15 |
| ABT2-108-534x/ABT1-122 hu | ABT2-108- | ABT1-122 | 1000 | 0.025, |
| IgG1/K wt | 534x | | | 0.035 |
| ABT2-108-537x/ABT1-122 hu | ABT2-108- | ABT1-122 | 1000 | 0.007, |
| IgG1/K wt | 537x | | | 0.02 |
| ABT2-108-538x/ABT1-122 hu | ABT2-108- | ABT1-122 | 100, | 0.007, |
| IgG1/K wt | 538x | | 1000 | 0.02, |
| | | | | 0.18 |
| ABT2-108-603/ABT1-122 hu | ABT2-108-603 | ABT1-122 | 1500 | 10 |
| IgG1/K wt | | | | |
| ABT2-108-605/ABT1-122 hu | ABT2-108-605 | ABT1-122 | 20, 2000 | 1.5, |
| IgG1/K wt | | | | 0.35 |
| ABT2-108-612/ABT1-122 hu | ABT2-108-612 | ABT1-122 | 100 | 1, 0.45 |
| IgG1/K wt | | | | |
| ABT2-108-617/ABT1-122 hu | ABT2-108-617 | ABT1-122 | 150 | 0.05 |
| IgG1/K wt | | | | |
| ABT2-108-620x/ABT1-122 | ABT2-108- | ABT1-122 | 150 | 0.05 |
| huIgG1/K wt | 620x | | | |
| ABT2-65/ABT1-122 hu IgG1/K | ABT2-65 | ABT1-122 | 2000 | 2000 |
| wt | | | | |
| ABT2-65-17/ABT1-122 hu | ABT2-65-17 | ABT1-122 | 70, 3000 | 0.1, |
| IgG1/K wt | | | | 0.45 |
| ABT2-65-8/ABT1-122 hu IgG1/K | ABT2-65-8 | ABT1-122 | 1000 | 2.7 |
| wt | | | | |
| ABT2-108/ABT1-122-505 hu | ABT2-108 | ABT1-122-505 | 2000 | 20 |
| IgG1/K wt | | | | |
| ABT2-108/ABT1-122-508 hu | ABT2-108 | ABT1-122-508 | 400 | 20 |
| IgG1/K wt | | | | |
| ABT2-65-17/ABT1-122-511 hu | ABT2-108 | ABT1-122-510 | 30, 200 | 0.1, |
| IgG1/K wt | | | | 0.16 |
| ABT2-108/ABT1-122-511 hu | ABT2-108 | ABT1-122-511 | 40 | 8 |
| IgG1/K wt | | | | |
| ABT2-108-521/ABT1-122-511 hu | ABT2-108-521 | ABT1-122-511 | 150 | 0.16 |
| IgG1/K wt | | | | |
| ABT2-108-538x/ABT1-122-511 | ABT2-108- | ABT1-122-511 | 1, 10, | 0.006, |
| hu IgG1/K wt | 538x | | 25, 200 | 0.009, |
| | | | | 0.01 |
| ABT2-108-620x/ABT1-122-511 | ABT2-108- | ABT1-122-511 | 10, 40, | 0.01, |
| huIgG1/K wt | 620x | | 200 | 0.02, |
| | | | | 0.03 |
| ABT2-108-620x/ABT1-122-512 | ABT2-108- | ABT1-122-512 | 150 | 0.006 |
| huIgG1/K wt | 620x | | | |
| ABT2-108-620x/ABT1-122-513 | ABT2-108- | ABT1-122-513 | 30, 100 | 0.01, |
| huIgG1/K w | 620x | | | 0.009 |
| ABT2-108/ABT1-122-554 hu | ABT2-108 | ABT1-122-554 | 150 | 9 |
| IgG1/K wt | | | | |
| ABT2-108/ABT1-122-555 hu | ABT2-108 | ABT1-122-555 | 70 | 7 |
| IgG1/K wt | | | | |
| ABT2-108-538x/ABT1-122-555 | ABT2-108- | ABT1-122-555 | 25 | 0.015 |
| hu IgG1/K wt | 538x | | | |
| ABT2-108/ABT1-122-556 hu | ABT2-108 | ABT1-122-556 | 150 | 15 |
| IgG1/K wt | | | | |
| ABT2-108-620x/ABT1-122-750M | ABT2-108- | ABT1-122- | 18.46 | 0.00555 |
| hu IgG1 wt | 620x | 750M | | |
| ABT2-108-620x/ABT1-122- | ABT2-108- | ABT1-122- | 10.14 | 0.00482 |
| 750MT hu IgG1 wt | 620x | 750MT | | |
| ABT2-108-538x/ABT1-122-750x | ABT2-108- | ABT1-122- | 4, 10, | 0.005, |
| hu IgG1/K wt | 538x | 750x | 100 | 0.008, |
| | | | | 0.01 |
| ABT2-108-620x/ABT1-122-750x | ABT2-108- | ABT1-122- | 17.52 | 0.005 |
| huIgG1/K wt | 620x | 750x | | |
| ABT2-108/ABT1-141 hu IgG1/K | ABT2-108 | ABT1-141 | 1000, | 15, 40, |
| wt | | | 1500, | 50, 80 |
| | | | 3000 | |
| ABT2-65/ABT1-141 hu IgG1/K | ABT2-65 | ABT1-141 | 7000 | 100 |
| wt | | | | |
| ABT2-65-17/ABT1-141 hu | ABT2-65-17 | ABT1-141 | 70 | 0.4 |
| IgG1/K wt | | | | |
| ABT2-65-8/ABT1-141 hu IgG1/K | ABT2-65-8 | ABT1-141 | 450 | 0.09 |
| wt | | | | |
| ABT2-108/ABT1-141-25 hu | ABT2-108 | ABT1-141-25 | N/A | 150 |
| IgG1/K wt | | | | |
| ABT2-108-521/ABT1-141-25 hu | ABT2-108-521 | ABT1-141-25 | 20 | 0.1 |
| IgG1/K wt | | | | |
| ABT2-65-17/ABT1-141-25 hu | ABT2-65-17 | ABT1-141-25 | 400 | 1 |
| IgG1/K wt | | | | |
| ABT2-65-17/ABT1-212 hu | ABT2-65-17 | ABT1-212 | 100 | 0.5, |
| IgG1/K wt | | | | 0.09 |
| ABT2-65-8/ABT1-212 hu IgG1/K | ABT2-65-8 | ABT1-212 | 5000 | 3.5 |
| wt | | | | |
| ABT2-108-538x/ABT1-221 | ABT2-108- | ABT1-221 | 200 | 0.01 |
| huIgG1/K wt | 538x | | | |
| ABT2-108-538x/ABT1-221 | ABT2-108- | ABT1-222 | 200 | 0.01 |
| huIgG1/K wt | 538x | | | |
| ABT2-108-538x/ABT1-95-15 | ABT2-108- | ABT1-95-15 | 0.9, 4, | 0.003, |
| huIgG1/K wt | 538x | | 10, 19 | 0.01, |
| | | | | 0.02, |
| | | | | 0.03, |
| | | | | 0.008 |
| ABT2-108-620x/ABT1-95-15 | ABT2-108- | ABT1-95-15 | 5 | 0.04 |
| huIgG1/K wt | 620x | | | |
| ABT2-65-166/ABT1-95-15 hu | ABT2-65-166 | ABT1-95-15 | 1.89 | 0.13 |
| IgG1/K wt | | | | |
| ABT2-65-17/ABT1-95-15 | ABT2-65-17 | ABT1-95-15 | 0.5, 1, | 0.01, |
| huIgG1/K wt | | | 5, 5.35 | 0.04, |
| | | | | 0.08, |
| | | | | 0.1 |
| ABT2-65-201/ABT1-95-15 hu | ABT2-65-201 | ABT1-95-15 | 0.652 | 0.03 |
| IgG1/K mut (234; 235) | | | | |
| ABT2-65-166/ABT1-95-184 hu | ABT2-65-166 | ABT1-95-184 | 0.068 | 0.15 |
| IgG1mut 234, 235/K | | | | |
| ABT2-108/ABT1-95-3 hu IgG1/K | ABT2-108 | ABT1-95-3 | 1500 | 200 |
| wt | | | | |
| ABT2-108-521/ABT1-95-A3 hu | ABT2-108-521 | ABT1-95-A3 | 0.027 | 0.098 |
| IgG1 wt | | | | |
| ABT2-108-538x/ABT1-95-A3 hu | ABT2-108- | ABT1-95-A3 | 0.095 | 0.035 |
| IgG1mut 234, 235/K | 538x | | | |
| ABT2-108-620x/ABT1-95-A3 hu | ABT2-108- | ABT1-95-A3 | 0.002 | 0.0073 |
| IgG1/K mut (234; 235) | 620x | | | |
| ABT2-65-166/ABT1-95-A3 | ABT2-65-166 | ABT1-95-A3 | 0.026, | 0.17 |
| huIgG1/K wt | | | 0.0178 | |
| ABT2-65-166/ABT1-95-A5 hu | ABT2-65-166 | ABT1-95-A5 | 0.015 | 0.145 |
| IgG1mut 234, 235/K | | | | |
| ABT2-65-166/ABT1-95-A6 hu | ABT2-65-166 | ABT1-95-A6 | 0.019, | 0.32 |
| IgG1/K wt | | | 0.35 | |

[0343] All showed greater than 1 log improvement in affinity on the surface of yeast in comparison to one of the best single CDR affinity matured 2-108 clones (FIG. 6). EC50 values for the clones and wild type were as follows (clone name (EC50 value)): 533x (0.04322); 534x (0.2354); 535x (0.04475); 536x (0.07300); 537x (0.03390); 538x (0.03956); and 521 (0.5222).

[0344] The best CDR recombination clones when converted into an IgG format paired with 1-122 showed greater than 1 log improvement in IL-1β neutralization potency vs. one of the best single CDR 2-108 affinity matured clones in a MRC-5 assay. EC50 (nM) values were determined as follows (clone name (EC50 value)): 2-108-533x/1-122 (0.03525); 2-108-534x/1-122 (0.02724); 2-108-537x/1-122 (0.006324); 2-108-538x/1-122 (0.005366); 2-108-521/1-122 (0.1878); and MAB201 (0.001218). The EC50 data showed the IL-1β neutralization potency of CDR recombination vs. single CDR affinity matured 2-108 clones as IgG.

[0345] In conclusion, the above describes a successful experiment which was able to affinity mature an IL-1β binding dAb in a scFv by yeast display. Through the use of the small scanning libraries and subsequent CDR recombination, multiple clones were identified that improved the affinity of 2-108 for IL-1β by greater than 3 logs. At least 4 of these clones, ABT2-108-533x, 534x, 537x, and 538x, were able to achieve the target goal of better than 200 pM neutralization potency for IL-1β in a MRC-5 assay when converted to an IgG format.

### 2.2.2 Affinity Maturation of Anti-Il-1α DAb Abt1-95-15 by Yeast Display

[0346] ABT1-95 was previously identified as an anti-human IL-1α Vκ dAb (see Example 1 and Table 60). ABT1-95 had low IL-1α neutralizing potency as a dAb and insignificant potency when converted into IgG. Using an emulsion technology and CDR mutagenesis, an improved ABT1-95-15 clone (dAb IC₅₀ in the low pM range) was generated (see above Example 2.1), with confirmed its improved potency (IC₅₀˜5 nM) in the IgG format with pairing heavy chains ABT2-108 or ABT2-65 lineages (anti-IL-1β VH dabs).

[0347] Since it is difficult to further improve the low pM affinity of ABT1-95-15 in the dAb format, affinity maturation of ABT1-95-15 was performed in the scFv format by yeast display.

[0348] The objective of this study was to affinity-mature ABT1-95-15 by yeast display in the scFv format by large CDR spiking libraries to sub-nM affinity and potency in the IgG format.

### Materials and Methods

[0349] Construction of the scFv yeast expression vector. ABT1-95-15 (VL to IL-1α) and ABT2-108-538x (VH to IL-1β) were subcloned into pYDs-TEV vector by standard molecular cloning. The complete construct is shown in FIG. 11.
Construction of large CDR spiking libraries. The pYDs-TEV plasmid was linearized with Sfi I and Not I restriction enzymes and purified.

[0350] ABT2-108-538x/ABT1-95-15 scFv fragment DNA was produced by overlapping PCRs with ABT1-95-15 framework primers, pYD vector specific primers, and long oligonucleotide primers containing mutations in each of the three ABT1-95-15 CDRs. The mutations were introduced by synthesizing the CDR region sequences at nucleotide ratio 70-10-10-10 (70%—original nucleotide, the other three nucleotides—10% each), (Table 10).

TABLE 10

Primers used for large CDR spiking libraries
construction

| | |
|---|---|
| Name | Oligo Sequence |

| | |
|---|---|
| 1-95-15-L1^{a} | CATCCTCCCTGTCTGCATCTGTAGGAGACCGTGTCACCA |
| | TCACTTGCCGGGCAAGTCAGCCGATTGTGCGGAACTTAA |
| | GGTGGTATCAGCAGAAACCAGG |
| 1-95-15-L2^{a} | TGGTATCAGCAGAAACCAGGGAAAGCCCCTAAGCTCCTG |
| | ATCTATTCTTCGTCCTATTTGGAGCCCGGGGTCCCATCA |
| | CGTTTCAGTGGTAGTGGATCCG |
| 1-95-15-L3^{a} | ACTCTCACCATCAGCAGTCTGCAACCCGAAGATTTTGCT |
| | ACGTACCACTGTCAACAGGGGTATCGTTGGCCTGTTACG |
| | TTCGGCCAAGGGACCAAGGTGG |
| 1-122 Gap 1 | GCAAGTGATGGTGACACGGTCTCCTACAGATGC |
| Rev new | |
| 1-122 Gap 3 | ATAGATCAGGAGCTTAGGGGCTTTCCCTGG |
| Rev new | |
| 1-95 Gap 4 | ACAGTGGTACGTAGCAAAATCTTCG |
| Rev pYD1 | AGTAACGTTTGTCAGTAATTGC |
| Fwd | |
| ABTVKSCFV | TTAGGGATAGGCTTACCTTCGAAGGGCCCTCTAGACTCG |
| Rev | AGGGCGGCCGCACGTTTGATTTCCACCTTGG |

^{a}Sequences in bold are spiked

Yeast libraries generation and QC Large yeast libraries were generated via homologous recombination by co-transforming yeast (EBY100) with linearized vector and PCR fragments with spikes in each of ABT1-95-15 CDRs in (FIG. 12).

[0351] Libraries output sizes were estimated by plating aliquots of transformed cells on SD(-UT) plates. Libraries diversity was verified by sequencing analysis of 24 individual colonies from each library.

[0352] Yeast libraries labeling and sorting. Expression of scFv fragments on the surface of yeast was induced by growing libraries in SRG(-UT) medium for 48 hours at 20° C.

[0353] For equilibrium library sorting yeast cells (5×10⁸ cells for each library at first round) were labeled with antigen (human IL-1α) at a concentration of 660 pM followed by staining with detection antibody (biotinylated goat polyclonal anti-IL-1α antibody, R&D Systems, Cat# BAF200, at concentration 5 μg/ml) and then Streptavidin-PE (Jackson ImmunoResearch Laboratories, Inc, Cat #016-110-034). ScFv expression was determined by staining libraries with anti-V5 mAb (Invitrogen, Cat# R96025) followed by anti-mouse IgG-FITC (Molecular Probes, Cat# F11021).

[0354] For off-rate sorts aliquots of round 1 outputs (9−25×10⁷ cells) were labeled with human IL-1α at 10 nM concentration followed by competition with IL-1α specific IgG (ABT2-65-17/ABT1-95-15 A-897661.0) at concentration 100 μg/ml for 60-80 minutes (3 to 4 half-lives). Antigen, still bound to the yeast surface was detected as described above.

[0355] Round 2 outputs (8−20×10⁶ cells) were subsequently sorted for round 3 as described above, except that competition time was 100 min.

[0356] Fourteen to twenty-eight clones from each library Round 3 output were analyzed by sequencing. Three clones from each sorting outputs were also analyzed on the surface of yeast for their affinity improvement.

[0357] CDR1 fragments from ABT1-95-15 L1 round 3 output, CDR2 fragments from ABT1-95-15 L2 round 3 output, and CDR3 fragments from ABT1-95-15 L3 round 3 output were mixed with linearized pYDs-Tev vector and transformed into EBY100 yeast cells to generate ABT1-95-15 CDR recombination library (FIG. 13)

[0358] Off-rate sort with competition for 3 hours (Round 1), 8 hours (Round 2) and 15 hours (Round 3) was used for CDR recombination library sortings. Round 3 output of CDR recombination library was analyzed by sequencing and 6 clones were selected for analysis on the surface of yeast. Best clones were converted into IgG paired with VH clones of 2-108 and 2-65 lineages.

### Results

### ABT1-95-15 Affinity Maturation by Large Single CDR Spiking Libraries

[0359] Estimated libraries output sizes for ABT1-95-15 libraries were 2−5×10⁷. Libraries QC analysis confirmed the presence of designed mutations in all CDR spiking libraries. Equilibrium sort was used for first round selection to remove non-binders for IL-1α antigen. The libraries were labeled at K_{D} of ABT2-108-538x/ABT1-95-15 scFv with 660 pM human IL-1α (see FIG. 14). Off-rate selection was used in subsequent library selections. Half-life of ABT1-95-15/IL-1α complex on the surface of yeast was determined to be 20 min (see FIG. 15). Half life values were determined as follows (clone name (half life)): 1-95-15 (19.77); L1-2B (162.7); L1-3B (52.56); L1-7 (31.56); L2-3 (38.26); L24 (39.47); L2-10 (21.43); L3-9 (46.10); L3-12 (23.62); and L3-13 (32.08).

[0360] Based on three rounds of sorting results for the three ABT1-95-15 individual CDR libraries (data not shown), all three libraries showed some improvement over ABT1-95-15 after three rounds of sorting.

[0361] Sequencing results of round 3 library selection output are listed in Table 11.

TABLE 11

Sorting results for ABT1-95-15 affinity
maturation by large single CDR libraries

| | | | | |
|---|---|---|---|---|
| Clone | CDR1 | CDR2 | CDR3 | Frequency |

| | | | | |
|---|---|---|---|---|
| ABT1-95-15 | RASQPIVRNLR | SSSYLEP | QQGYPWPVT | |
| a) | RASQPIVRNLR | | | 2 |
| | RASQSNLRNLR | | | 1 |
| | RASRTPVRNLR | | | 1 |
| | RANRTRVRNLR | | | 2 |
| L1-2B | RKNNPFVRNLR | | | 4 |
| | RKNHPNMRNLR | | | 1 |
| | RKNHPHIRNLR | | | 1 |
| L1-7 | RKTHPTVRNLR | | | 2 |
| | RKAHPMVRNLR | | | 1 |
| | RKLQPFVRNLR | | | 1 |
| | RKSSPMVRNLR | | | 1 |
| | LKRHPSVRNLR | | | 1 |
| | LKRQPSVRNLR | | | 1 |
| L1-3B | RKSHPFVRNLR | | | 2 |
| | RASQTRVQNLR | | | 1 |
| | RARRAPVRNLR | | | 1 |
| | RARNTPVRNLR | | | 1 |
| | RASRPNVRNLR | | | 1 |
| | RASRPIVRNLR | | | 1 |
| | RGSRPGIRNLR | | | 1 |
| | RRSGPNVRNLR | | | 1 |
| | LKSHPHVRNLR | | | 1 |
| b) | | SSSYLEP | | 1 |
| L2-4 | | SVSYLEP | | 4 |
| L2-3 | | SRSYLEP | | 2 |
| L2-10 | | SKSYLEP | | 2 |
| | | SVSWLEP | | 1 |
| | | SISYLEP | | 1 |
| | | STKNVER | | 1 |
| | | SWSFLQP | | 1 |
| | | SSNYLAP | | 1 |
| | | ARSYLEP | | 1 |
| c) | | | QQGYRWPVT | 10 |
| | | | RMGYRWPVT | 1 |
| L3-10 | | | KAGYVWPVP | 1 |
| L3-12 | | | KAGYRWPVT | 1 |
| L3-13 | | | RSGYRWPVT | |

a) Clones from CDR1 library (L1)
b) Clones from CDR2 library (L2)
c) Clones from CDR3 library (L3)

[0362] Sequencing results showed that round 3 selection outputs for all 3 libraries were diverse, with most diversity observed in CDR1 library (L1). CDR3 library (L3) was least diverse and majority of the clones had parental CDR3 sequence.

[0363] Three clones from each library were selected for the analysis on the surface of yeast based on their frequency. Off-rate analysis for these clones on yeast surface is presented in FIG. 15.

[0364] All analyzed clones showed improvement (2-5 fold) in their off-rates over parental clone ABT1-95-15, and the most improvement was observed in clones from the CDR1 library (L1).

### ABT1-95-15 CDR Recombination Library

[0365] Round three library outputs for individual CDR libraries were recombined in yeast to generate an ABT1-95-15 CDR recombination library (data not shown).

[0366] Significant improvement in off-rate over parental clone ABT1-95-15 was observed in the first round of library sorting. Additional rounds of sorting with increasing competition time with IL-1α-specific IgG ABT2-65-17/ABT1-95-15 did not lead to better discrimination between the best clones and the rest of population. The reason for this was probably the fact that off-rate for IgG competitor was much faster then for affinity-matured clones and therefore the competitor ABT2-65-17/ABT1-95-15 IgG had become inefficient for antigen competition. As a result, round 3 sorting output for CDR recombination library was very diverse (see Table 12).

[0367] Six clones from ABT1-95-15 CDR Recombined Library Round 3 output (ABT1-95-A1, -A2, -A3, A4, A5 and -A6) were selected for further analysis on yeast surface based on their frequency and frequencies of their individual CDRs.

[0368] On-rate, off-rate and K_{D} analysis of these clones on yeast surface is presented in FIGS. 16 and 17. A 10 to 30 fold improvement was observed in K_{D} on yeast surface for affinity matured clones. On rate analysis half life was determined to be the following (clone name (half life)): 1-95-A3 (2.817); 1-95-A5 (3.244); 1-95-A6 (4.485); 1-95-15 (6.924); amd 1-95-A1 (9.449). Off rate analysis half life was determined to be (clone name (half life)): 1-95-A3 (1.795); 1-95-A2 (2.235); 1-95-A4 (1.991); 1-95-A6 (1.795); 1-95-15 (0.3978); amd 1-95-A1 (3.132). EC50 values were determined to be (clone name (EC50 value)): 1-95-A3 (0.01982); 1-95-A5 (0.02668); 1-95-A6 (0.03965); 1-95-A1 (0.7647); 1-95-15 (0.6731).

TABLE 12

1-95-15 CDR Recombined Library Round3 sorting
outputs

| | | | | |
|---|---|---|---|---|
| Clone | CDR1 | CDR2 | CDR3 | Frequency |

| | | | | |
|---|---|---|---|---|
| ABT1-95-15 | RASQPIVRNLR | SSSYLEP | QQGYRWPVT | |
| ABT1-95-A3 | RASKPGVRNMR | SVSYLEP | LQGYRWPPT | 11 |
| | RASKPGVRNMR | SVSYLEP | QQGYRWPVT | 1 |
| | RASKPGVRNMR | SVSYLEP | RQGYRWPVT | 1 |
| ABT1-95-A6 | RASKPGVRNMR | AKSYLEP | KQGYRWPVQ | 2 |
| | RASKPGVRNMR | AKSYLEP | QQGYRWPVT | 1 |
| | RASKPGVRNMR | SKSYLEP | QQGYRWPVT | 1 |
| | RASKPGVRNMR | SSSYLNP | QQGYRWPVT | 2 |
| | RASKAGVRNLR | SVSYLEP | LQGYRWPPT | 1 |
| | RASKAGVRNLR | SVSWLEP | RQGYVWPVP | 1 |
| ABT1-95-A4 | RASRPGVRNLR | SRSFLEP | LQGYRWPPT | 2 |
| | RASRPGVRNLR | SRSFLEP | QQGYRWPVT | 1 |
| | RASRPGVRNLR | SVSFLEP | RQGYVWPVP | 1 |
| | RASRPGVRNLR | SVSYLEP | LQGYRWPPT | 1 |
| ABT1-95-A1 | RASRPGVRNLR | HVSDLEP | RQGYVWPVP | 4 |
| | RGSRPGIRNLR | SVSFLEP | LQGYRWPPT | 1 |
| | RGSRPGIRNLR | ASSNLEP | QQGYRWPVT | 1 |
| ABT1-95-A5 | RASRTPVRNLR | SRSFLEP | LQGYRWPPT | 2 |
| | QASQPGVRNMR | SVSFLEP | RQGYRWPVT | 1 |
| | QASQPGVRNMR | SVSYLEP | QQGYRWPVT | 1 |
| | QASQPGVRNMR | STSSLQP | QQGYRWPVT | 1 |
| ABT1-95-A2 | RILQPPGRNLR | SKSFLEP | QQGYRWPVT | 6 |
| | RASHGGVRNLR | SASYLEP | QQGYRWPVT | 1 |
| | RASHSPVRNLR | SVSYLEP | KAGYVWPVP | 1 |
| | RAGHPRVRNLR | SSSYLQP | QQGYRWPVT | 1 |
| | RASNQRVRNLR | SVSYLEP | QQGYRWPVT | 2 |
| | RKNHPDVRNLR | SSSLLEP | QQGYRWPVT | 1 |
| | RKSQPNMRNLR | STSLLDR | QQGYRWPVT | 1 |
| | RASQPGVRNLR | SSSYLEP | QQGYRWPVT | 2 |
| | RASQPSVRNLR | SKSYLEP | QQGYRWPVT | 1 |

[0369] Based on the K_{D} analysis on yeast surface, clones ABT1-95-A3, -A5 and -A6 were selected for conversion into IgG format with a pairing heavy chain containing V_{H} of ABT2-108 and ABT2-65 lineages. MRC-5 assays demonstrated up to 1000-fold improvement in IL-1α neutralization potency for the affinity-matured clones. MRC-5 IL-1a (50 pg/ml IL-1a) inhibition assay values (EC50 nM) were determined to be 0.004457 for ABT2-108-620x/ABT1-95-A3 compared with 5.074 ABT2-108-620x/ABT1-95-15 (controls IL-1RA=0.6996 and MAB200=0.07000).

[0370] In conclusion, the above example demonstrates that it is possible to affinity mature an anti-IL-1α Vκ domain antibody ABT1-95-15 to low pM potency by yeast display in the scFv format. The three CDRs were mutated by spiking in 30% of mutating nucleotides in the CDR regions, which resulted in three very large yeast libraries. These libraries were selected for improved clones through three rounds of sorting, followed by the generation of a large CDR recombination library to combine all CDR mutations present in the round 3 selection outputs. This approach maximizes the chance to identify CDR mutations that are beneficial to the antigen affinity without pre-determining the mutation positions within the CDRs as they are determined by random and low frequency mutagenesis. The subsequent CDR recombination library approach seeks to identify individual CDR mutations that are compatible with one another that as a whole further the affinity improvement of these mutants. This method is time efficient.

2.3. Affinity maturation of IL-1α/β Dual-Specific Antibodies by a Yeast Surface Fab Expression System

[0371] Two domain antibodies (anti-IL-1β VH dAb ABT2-108 and anti-IL-1α Vκ dAb ABT1-122), identified from single domain antibody library selections (described above in Example 1) were chosen for affinity maturation by yeast display. Both Fab and scFv expression systems were employed to carry out the affinity maturation works. This example focuses on the affinity maturation works by the Fab expression system.

[0372] The objective of the study was to develop a yeast surface Fab expression system for the affinity maturation of two IL-1 dAb leads.

### Materials and Methods

[0373] Construction of a Fab expression vector. The pFab-B vector was based on the pESC-Trp vector (Stratagene) for expressing Fab proteins on yeast surface. Both ABT2-108 and ABT1-122 were subcloned into the pFab-B vector by standard molecular cloning methods. The completed pFab-B-2-108/1-122 vector is shown in FIG. 9.
Construction of mini-libraries. Gapped Fab vectors were generated by PCR amplification using Platinum HiFi DNA polymerase (Invitrogen) and ‘gap primers’ that flanks each CDRs. The PCR amplification produced ‘gapped vectors’ in which 15 to 21 nucleotides were deleted from pFabB-2-108/1-122, leaving a gap across the CDR of interest. Seven gapped vectors were generated for ABT 2-108 (1 for CDR1, 3 for CDR2, and 3 for CDR3) and five gapped vectors for ABT 1-122 (2 for CDR1, 1 for CDR2, and 2 for CDR3). Primers used for gapped vectors generation are listed below in Table 13.

[0374] Thirty homologous recombination oligos were made for ABT2-108 and twenty-one oligos were made for ABT1-122. These oligos contained the 15-21 nucleotides removed in the gapped vectors as well as about 40 nucleotide-flanking sequences both up- and downstream of the gap. Each homologous recombination oligos randomizes three consecutive amino acids in the CDR gap.

TABLE 13
PCR primers used for gapped vectors generation

| | | |
|---|---|---|
| | | SEQ |
| | | ID |
| Name | Oligo sequence | NO: |

| | |
|---|---|
| 2-108 Gap 1 | TGGGTCCGCCAGGCTCCAGGGAAGGGTCTC |
| Fwd new | |
| 2-108 Gap 1 | AAAGGTGAATCCGGAGGCTGCACAGGAGAG |
| Rev new | |
| 2-108 Gap 2 | AATACATACTACGCAGACTCCGTGAAGGGC |
| Fwd new | |
| 2-108 Gap 2 | TGAGACCCACTCGAGACCCTTCCCTGGAGC |
| Rev new | |
| 2-108 Gap 3 | GACTCCGTGAAGGGCCGGTTCACCATCTCC |
| Fwd new | |
| 2-108 Gap 3 | ATCCTGCCCAATACGTGAGACCCACTCGAG |
| Rev new | |
| 2-108 Gap 4 | CGGTTCACCATCTCCCGCGACAATTCCAAG |
| Fwd new | |
| 2-108 Gap 4 | GTATGTATTCTTACCATCCTGCCCAATACG |
| Rev new | |
| 2-108 Gap 5 | CATCATCTTTTTGACTACTGGGGTCAGGGAAC |
| Fwd new | |
| 2-108 Gap 5 | TTTCGCACAGTAATATACCGCGGTGTCCTC |
| Rev new | |
| 2-108 Gap 6 | GACTACTGGGGTCAGGGAACCCTGGTCACC |
| Fwd new | |
| 2-108 Gap 6 | AACCCGACCCGTATATTTCGCACAGTAATATAC |
| Rev new | |
| 2-108 Gap 7 | TGGGGTCAGGGAACCCTG |
| Fwd | |
| 2-108 Gap 7 | ATGATGAACACCAACCCGAC |
| Rev | |
| 1-122 Gap 1 | ACTGAGTTAAATTGGTATCAGCAGAAACCAGG |
| Fwd new | |
| 1-122 Gap 1 | GCAAGTGATGGTGACACGGTCTCCTACAGATGC |
| Rev new | |
| 1-122 Gap 2 | TGGTATCAGCAGAAACCAGGGAAAGCCCCTAAG |
| Fwd new | |
| 1-122 Gap 2 | CGGCTGACTTGCCCGGCAAGTGATGGTG |
| Rev new | |
| 1-122 Gap 3 | GGGGTCCCATCACGTTTCAGTGGCAGTGG |
| Fwd new | |
| 1-122 Gap 3 | ATAGATCAGGAGCTTAGGGGCTTTCCCTGG |
| Rev new | |
| 1-122 Gap 4 | GCTACGTTCGGCCAAGGGACCAAGGTGGAAATC |
| Fwd new | |
| 1-122 Gap 4 | ACAGTAGTACGTAGCAAAATCTTCAGGTTGCAG |
| Rev new | |
| 1-122 Gap 5 | TTCGGCCAAGGGACCAAGGTGGAAATCAAACG |
| Fwd new | |
| 1-122 Gap 5 | AGCAAACTGTTGACAGTAGTACGTAGCAAAATC |
| Rev new | |

Yeast libraries generation and QC Yeast mini-libraries were generated via homologous recombination by co-transforming yeast (EBY100) with gapped vectors and corresponding homologous recombination oligos.

[0375] Libraries output sizes were estimated by plating aliquots of transformed cells on SD(-UT) plates. Libraries diversity was verified by sequencing analysis of 5 individual colonies from each library.

Yeast libraries labeling and sorting. Expression of Fab fragments on the surface of yeast was induced by growing libraries in SRG(-UT) medium for 48 hours at 20° C.

[0376] Aliquots of libraries (4×10⁶ cells for each library) were labeled with antigen (IL-1α or IL-1β) at defined concentrations, followed by staining with detection antibodies (biotinylated goat polyclonal anti-IL-1α antibody, R&D Systems, Cat # BAF200, at concentration 5 μg/ml, or biotinylated goat polyclonal anti-IL-1β antibody, R&D Systems, Cat # BAF 201, at concentration 5 μg/ml), and then straptavidin-PE. Fab expression was determined by staining libraries with either anti-HA mAb 12C5 (Roche) or anti-human Cκ (AbCam, Cat# Ab1050), followed by anti-mouse IgG-FITC (Molecular Probes).

[0377] ABT2-108 libraries were individually sorted for Round 1 at antigen (IL-1β) concentration 220 pM. R1 outputs were sorted individually and in pools at antigen concentration 220 pM (Round 2). Pooled R2 outputs were sorted at antigen concentration 220 pM and 110 pM (Round 3). Ten clones from each pooled R3 output were analyzed by sequencing

[0378] ABT1-122 libraries were individually sorted for Round 1 at antigen (IL-1α) concentration 100 nM. R1 outputs were sorted individually and in pools at antigen concentration 100 nM (Round 2). Pooled R2 outputs were sorted at antigen concentration 50 nM (Round 3) Pooled R3 outputs were sorted at antigen concentration 20 nM (Round 4). Ten clones from each pooled R3 and R4 output were analyzed sequencing.

[0379] Identified clones were analyzed for their K_{D} on the surface of yeast. Clones with improved K_{D} were converted into full-length IgG and expressed in COS cells. ABT2-108 CDR recombination libraries generation and sorting CDR1 fragments were PCR amplified from ABT2-108, -601, -602, and -618 using primers 2-108-CDR1F (Table 14) and 2-108Gap2Rev-new. CDR2 fragments were PCR amplified from ABT2-108, -603, -604, -605, -606, -607, -607, -609, -610, -611, -615, and -619 using primers 2-108-CDR2F and 2-108-CDR2R. CDR3 fragments were amplified from ABT2-108, -612, -613, -614, -616, and -617 using primers 2-108Gap4Fwd-new and 2-108-CDR3R. Overlapping CDR fragments were transformed into and homologously recombined in EBY100 cells with either ABT1-122 or ABT1-122-511 pairing light chain to generate CDR recombination libraries. The estimated library output sizes are 2.2×10⁵ for ABT1-122-paired library and 3.4×10⁵ for ABT1-122-511-paired library. Twelve colonies from each library were sequenced for QC.

TABLE 14

PCR primers used in CDR amplification for
recombination libraries

| | |
|---|---|
| Name | Oligo Sequence |

| | |
|---|---|
| 2-108-CDR1F | CAAGTATTTCGGAGTGCCTGAAC |
| 2-108-CDR2F | GTCCGCCAGGCTCCAGGGAAAGG |
| 2-108-CDR2R | TCGCACAGTAATATACCGCGGTG |
| 2-108-CDR3R | GCATTGGTGACTATTGAGCACGTG |

[0380] Two rounds of on-rate sorting were performed for these two libraries. Round 1 was selected by labeling library with 500 pM biotinylated IL-1β for 15 minutes incubation. Round 2 was selected with both 250 pM and 500 pM biotinylated IL-1β for 15 minutes incubation. Eight clones from the 500 pM R2 sorts and 4 clones from the 250 pM R2 sorts were sequenced from each library. An clone ABT2-108-620x identified from the R2 selection was chosen for conversion into IgG and tested by MRC-5 assay.

### Results

### ABT2-108 Affinity Maturation

[0381] Estimated libraries output sizes for ABT2-108 libraries were 6×10⁴ to 3×10⁵. Libraries QC analysis confirmed the presence of designed mutations for most of the libraries. Some colonies however showed mixed CDR sequences presumably due to an initial uptake of more then one copy of the plasmid by yeast cell. Sorting results for ABT2-108 affinity maturation are shown in FIG. 8.

[0382] All 6 pooled libraries showed improved binding to IL-1β at concentration of 110 pM IL-1β after 3 rounds of sorting. Sequencing analysis of individual clones from round 3 outputs (Table 15) revealed existence of hot spots for mutagenesis. The same hot spots and similar or identical mutations were identified during ABT2-108 affinity maturation in yeast display ScFv format.

TABLE 15
Sorting outputs for ABT2-108 affinity maturation

| | | | | |
|---|---|---|---|---|
| Clone # | CDR1 | CDR2 | CDR3 | Frequency |

| | | | | |
|---|---|---|---|---|
| ABT2-108 | EYTMM | RIGQDGKNTYYADSVKG | YTGRVGVHHLFDY | |
| -601 | EESWM | | | 28 |
| -602 | EEKYM | | | 1 |
| -603 | | RITDAGKNTYYADSVKG | | 14 |
| -604 | | RVTYDGKNTYYADSVKG | | 2 |
| -605 | | RIGQDGKNTYYREDVKG | | 8 |
| -606 | | RIGQDGKNTYYRSSVKG | | 1 |
| -607 | | RIGQDGKNTYYRSDVKG | | 1 |
| -608 | | RIGQDGKNTYTRDSVKG | | 3 |
| -609 | | RIGQDGKNTVYRDSVKG | | 3 |
| -610 | | RIGQDGKNTVVRDSVKG | | 1 |
| -611 | | RIGQDGKNTVLRDSVKG | | 2 |
| -612 | | | YTGRIMGHHLFDY | 3 |
| -613 | | | YTGRVFENHLFDY | 6 |
| -614 | | | YTGRILRHHLFDY | 6 |
| -615 | | RIGQDGKNTVIRDSVKG | | 1 |
| -616 | | | YTGRIYNHHLFDY | 2 |
| -617 | | | YTGRIFTHHLFDY | 2 |
| -618 | EEYFM | | | 3 |
| -619 | | RHGWDGKK-YYADSVKG | | 7 |

[0383] KD analysis of identified clones on the surface of yeast (FIG. 9) showed improvements in affinity from 5 fold (ABT2-108-604) to 25 fold (ABT2-108-615, -617). EC50 values of the clones were as follows (clone name (EC50 nM): 2-108 (5.778); 2-108-601 (0.5225); 2-108-602 (0.4741); 2-108-603 (1.349); 2-108-604 (1.348); 2-108-605 (0.2096); 2-108-606 (0.3432); 2-108-608 (0.3657); 2-108-611 (0.3508); 2-108-612 (0.2674); 2-108-613 (0.5273); 2-108-614 (1.010); 2-108-615 (0.2145); 2-108-616 (0.3237); and 2-108-617 (0.2236).

[0384] Six improved clones (ABT2-108-601, -603, -605, -612, -613 and -617) were converted into IgG constructs and expressed in COS cells paired with ABT1-122 light chain.

[0385] MRC-5 analysis of these clones showed significant improvement in neutralization potency (by at least 20-100 fold when compared with the parental ABT2-108) for clones ABT2-108-605, -612, -613 and -617.

### ABT1-122 Affinity Maturation

[0386] Estimated libraries output sizes for ABT1-122 libraries were 8×10⁴ to 3×10⁵. Libraries QC analysis again showed mixed CDR sequences in many libraries, presumably due to initial uptake of more than one copy of the plasmid by yeast cell. Furthermore, some of the clones were found to contain multiple repeats of the recombination oligos and several clones showed single base insertion or deletion in the coding region. In all, only 25% of the clones analyzed had sequences with designed mutations in appropriate CDRs. Three libraries covering the 3′ half of CDR3 were not sorted due to high background of parental vector during library construction.

[0387] Sorting results for ABT1-122 affinity maturation are shown in FIG. 10. None of the pooled ABT1-122 libraries showed significant improvement in IL-1α binding after 3 rounds of sorting. Many clones in these libraries showed lack of the staining with anti-human Cκ antibody, presumably due to frame-shifting mutations occurred during libraries construction.

[0388] Sequencing analysis of individual clones from Round 3 outputs is shown below in Table 16.

TABLE 16
Sorting outputs for 1-122 affinity maturation

| | | | | |
|---|---|---|---|---|
| Clone # | CDR1 | CDR2 | CDR3 | Frequency |

| | | | | |
|---|---|---|---|---|
| ABT1-122 | RASQPIWTELN | GSSSLQS | QQFAYFPATF | |
| -501 | RFSYPIWTELN | | | 2 |
| -502 | RAVYLIWTELN | | | 1 |
| -503 | | | EQFAYFPATF | 2 |
| -504 | | | KQFAYFSATF | 1 |
| -505 | | | KQFAYFPATF | 9 |
| -506 | | GSMHTQS | | 1 |
| -507 | | RSSSLQS | | 1 |
| -508 | | GSSSLQR | | 1 |
| -509 | | GHAELQS | | 8 |

None of the identified clones, when analyzed on the surface of yeast, showed improvements in KD, even though they were much brighter than the parental clone ABT1-122. Similar results (i.e. lack of improved IL-1α-binding clones) were found by affinity-maturing ABT1-122 in the scFv format.

[0389] Three of the identified Fab clones (ABT1-122-505, -508 and -510) were converted into IgG constructs and expressed in COS cells with pairing ABT2-108 heavy chain. None of these clones showed improvements in IL-1α neutralization potency. Mutations from ABT1-122-505 and -508 were subsequently combined and produced the ABT1-122-511 clone. This clone, when converted into IgG with several of the improved anti-IL-1β ABT2-108 heavy chains showed improvements in its IL-1α neutralization potency by 4 to 5 folds. Representative IC50 data for ABT2-108/1-122-511 IgG is described in Table 9.

### ABT2-108 CDR Recombination

[0390] Analysis of the round 2 outputs of the 2-108 CDR recombination clones is shown in Table 17. ABT2-108-601 was the dominant CDR1 sequence seen, and ABT2-108-612 was the most frequent CDR3 sequence observed. CDR2 sequences in the output showed more diversity, with ABT2-108-605 being represented the most. Based on these data, ABT2-108-620x (601-605-612) was converted in IgG with ABT1-122 and ABT1-122-511 light chains and tested in MRC-5 assays. Both pairs of ABT2-108-620x showed IL-1β neutralization potencies in the low pM range (see Table 18 below).

TABLE 17
ABT2-108 CDR recombination library R2 sorting outputs

| 1-122 Paired Library | 1-122-511 Paired Library |
|---|---|
| 0.5 nM Sort, R2 | 0.5 nM Sort, R2 |
| CDR1-CDR2-CDR3 | CDR1-CDR2-CDR3 |
| 601-WT-612 | 601-WT-612, 3x |
| 601-605-612 | 601-605-612 |
| 601-606-612 | 601-607-612 |
| 601-608-612 | 601-605-616 |
| 601-609-612 | 601-605-617 |
| 601-605-613 | 601-605-WT |
| 601-605-616 | |
| 601-607-616 | |
| 0.25 nM Sort, R2 | 0.25 nM Sort, R2 |
| WT-605-612 | 601-WT-612, 2x |
| 601-609-612 | 601-605-612, 2x |
| 601-606-612 | |
| 601-605-616 | |

TABLE 18
MRC-5 IL-1β neutralization potencies

| Clone numbers | % Inhbition | |
|---|---|---|
| 2-108/1-122 | ~15 | nM |
| 2-108-605/1-122 | ~0.35 | nM |
| 2-108-612/1-122 | ~0.45 | |
| 2-108/1-122-511 | ~8 | nM |
| 2-108-620x/1-122 | ~0.05 | nM |
| 2-108-620x/1-122-511 | ~0.03 | nM |
| MAB201 | ~0.004 | nM |

[0391] In conclusion, the above example demonstrates the feasibility of affinity maturation of dual-specific antibody by a newly developed Fab expression system on the surface of yeast cells. ABT2-108 dAb was affinity matured by at least 20-100 fold in this Fab expression system. This finding is consistent with that observed by the well established scFv yeast display system described above in Examples 2.2, as similarly improved clones were identified by both approaches.

[0392] The identification of improvement clones in the ABT1-122 individual CDR affinity maturation did not occur with the Fab expression system, although this was also observed by a parallel scFv approach (data not shown). The combination of two single amino acid changes in CDR2 and CDR3, however, resulted in an ABT1-122-511 clone with 4-5 fold improved neutralization potency as compared with parental ABT1-122 clone.

[0393] Thus, the results showed that domain antibodies can be affinity matured, and, furthermore, that yeast Fab display system can be used for their affinity maturation.

### Example 3

### Summary of dAbs

[0394] A summary of the domain antibodies with advantageous neutralizing and affinity characteristics, i.e., dabs with these properties identified in the library screen and subjected to affinity maturation processes described above, is provided in Table 61 and in Table 19 below. For each clone described herein, the first part its name relates to its specificity (IL-1α represented by ABT1; and IL-1β represented by ABT2).

TABLE 19
Summary of lead dAb molecules

| Clone Name | Clone type | Specificity | MRC5 ND₁₀ | | MRC5 ND₅₀ | |
|---|---|---|---|---|---|---|
| ABT1-6-23 | VH (3.5G VH3) | IL-1α | 3 | nM | 30 | nM |
| ABT1-86 | VH (4G H17) | IL-1α | <200 | nM | 900 | nM |
| ABT1-95 | VK (4G K) | IL-1α | 150 | nM | 700 | nM |
| ABT1-96 | VH (4G H15) | IL-1α | 3 | nM | 11 | nM |
| ABT1-98 | VH (4G H11) | IL-1α | 10 | nM | 30 | nM |
| ABT1-122 | VK (4G K) | IL-1α | 9 | nM | 50 | nM |
| ABT1-141 | VK (4G K) | IL-1α | 10 | nM | 70 | nM |
| ABT2-13 | VH (4G H11) | IL-1β | 100 | nM | 800 | nM |
| ABT2-42 | VK (4G K) | IL-1β | 100 | nM | 770 | nM |
| ABT2-46 | VK (4G K) | IL-1β | 70 | nM | 386 | nM |
| ABT2-65 | VH (4G H18) | IL-1β | 100 | nM | 266 | nM |
| ABT2-76 | VK (4G K) | IL-1β | 50 | nM | 456 | nM |
| ABT2-108 | VH (4G H17) | IL-1β | 150 | nM | 250 | nM |

Detailed information regarding each of the identified IL-1α and IL-1β antibodies having advantageous neutralizing and affinity characteristics is also provided below:

### A. Domain Antibody: ABT1-6-23

### Library: 3.5G VH3

[0395] Amino Acid Sequence: (diversified residues are indicated in bold; the CDRs are underlined)

EVQLLESGGGLVQPGGSLRLSCAASGFTFVRYDMAWVRQAPGKGLEWVSS
IYKSGALTSYDSVKGRFTISRDNSKNTLYLQMNSLRAEDTAVYYCAKGWA
SFDYWGQGTLVTVSS

Clone ABT1-6-23 is an affinity matured variant; created by combining CDR1 from ABT1-6-15 with CDR2 from ABT1-6-3 (these three clones are all affinity matured derivatives of the parental clone ABT1-6). The CDR3 for all three affinity matured clones is unchanged from the parental clone ABT1-6. The CDR amino acid sequences are detailed in Table 20.

TABLE 20

Summary of the CDR differences between the
parental ABT1-6 clone and the affinity
matured progeny.

| | | | |
|---|---|---|---|
| CDR1 | CDR2 | CDR3 | MRC5 ND₅₀ |

| | | | | | |
|---|---|---|---|---|---|
| ABT1-6 | GAYDMQ | SINKSGALTSYDSVKG | GWASFDY | 15 | μM |
| ABT1-6-3 | GAYDMQ | SIYKSGALTSYDSVKG | GWASFDY | 0.08 | μM |
| ABT1-6-15 | VRYDMA | SINKSGALTSYDSVKG | GWASFDY | 2 | μM |
| ABT1-6-23 | VRYDMA | SIYKSGALTSYDSVKG | GWASFDY | 0.03 | μM |

Amino acid differences from the parental clone are in bold and underlined text.

### Calculated MW: 12565 Da

### MRC5 ND₅₀: 30 nM

### Specificity: IL-1α.

[0396] No significant inhibition by other human or murine IL-1 family members including IL-1β, IL-1 receptor antagonist, IL-18, or human TNF.
BIAcore Kinetic Analysis: The calculated kinetic dissociation constant (K_{D}), association rate constant (kₐ) and dissociation rate constant (k_{d}) are summarized in Table 21.

TABLE 21
Kinetic constants determined by BIAcore analysis

| kₐ (M · s⁻¹) | k_{d} (s⁻¹) | K_{D} (M) | χ² |
|---|---|---|---|
| 2.0 × 10⁵ | 1.2 × 10⁻² | 6.1 × 10⁻⁸ | 1.94 |

### B. Domain Antibody: ABT1-86

### Library: 4G H17

[0397] Amino Acid Sequence: (diversified residues are indicated in bold; the CDRs are underlined. A single K to E framework 3 mutation is highlighted in parentheses)

EVQLLESGGGLVQPGGSLRLSCAASGFTFDRYIMAWVRQAPGKGLEWVSS
ITPSGAATYYADSVKGRFTISRDNSKNTLYLQMNSLRAEDTAVYYCA
(E) EPADRYSTWTFDYWGQGTLVTVSS

### Calculated MW: 13398 Da

### MRC5 ND₅₀: 900 nM

### Specificity: IL-1α.

[0398] No significant inhibition by other human or murine IL-1 family members including IL-1β, IL-1 receptor antagonist, IL-18, or human TNF.

### BIAcore Kinetic Analysis:

[0399] The calculated kinetic dissociation constant (K_{D}), association rate constant (kₐ) and dissociation rate constant (k_{d}) are summarized in Table 22.

TABLE 22
Kinetic constants determined by BIAcore analysis

| kₐ (M · s⁻¹) | k_{d} (s⁻¹) | K_{D} (M) | χ² |
|---|---|---|---|
| 8.2 × 10⁵ | 9 × 10⁻² | 1.1 × 10⁻⁷ | 0.03 |

### C. Domain Antibody: ABT1-95

### Library: 4G K

[0400] Amino Acid Sequence: (diversified residues are indicated in bold; the CDRs are underlined)

DIQMTQSPSSLSASVGDRVTITCRASQPIHGNLRWYQQKPGKAPKLLIYN
ISNLQSGVPSRFSGSGSGTDFTLTISSLQPEDFATYYCQQGYRWPVTFGQ
GTKVEIKR

### Calculated MW: 11930 Da

### MRC5 ND₅₀: 800 nM

### Specificity: IL-1α.

[0401] No significant inhibition by other human or murine IL-1 family members including IL-1β, IL-1 receptor antagonist, IL-18, or human TNF.

### BIAcore Kinetic Analysis:

[0402] The calculated kinetic dissociation constant (K_{D}), association rate constant (kₐ) and dissociation rate constant (k_{d}) are summarised in Table 23.

TABLE 23
Kinetic constants determined by BIAcore analysis

| kₐ (M · s⁻¹) | k_{d} (s⁻¹) | K_{D} (M) | χ² |
|---|---|---|---|
| 4.9 × 10⁵ | 2.2 × 10⁻² | 4.5 × 10⁻⁸ | 0.13 |

### D. Domain Antibody: ABT1-96

### Library: 4G H15

[0403] Amino Acid Sequence: (diversified residues are indicated in bold; the CDRs are underlined)

EVQLLESGGGLVQPGGSLRLSCAASGFTFNQYNMFWVRQAPGKGLEWVSV
ISGSGRPTYADSVKGRFTISRDNSKNTLYLQMNSLRAEDTAVYYCAKGWW
RRDPPFDYWGQGTLVTVSS

### Calculated MW: 13408 Da

### MRC5 ND₅₀: 11 nM

### Specificity: IL-1α.

[0404] No significant inhibition by other human or murine IL-1 family members including IL-1β, IL-1 receptor antagonist, IL-18, or human TNF.

### BIAcore Kinetic Analysis:

[0405] The calculated kinetic dissociation constant (K_{D}), association rate constant (kₐ) and dissociation rate constant (k_{d}) are summarised in Table 24.

TABLE 24
Kinetic constants determined by BIAcore analysis

| kₐ (M · s⁻¹) | k_{d} (s⁻¹) | K_{D} (M) | χ² |
|---|---|---|---|
| 3.7 × 10⁵ | 3.9 × 10⁻⁴ | 1.1 × 10⁻⁹ | 0.8 |

### E. Domain Antibody: ABT1-98

### Library: 4G H11

[0406] Amino Acid Sequence: (diversified residues are indicated in bold; the CDRs are underlined)

EVQLLESGGGLVQPGGSLRLSCAASGFTFDGYIMSWVRQAPGKGLEWVS
TISPLGSVTYYADSVKGRFTISRDNSKNTLYLQMNSLRAEDTAVYYCAK
KGPWFDYWGQGTLVTVSS

### Calculated MW: 12645 Da

### MRC5 ND₅₀: 30 nM

### Specificity: IL-1α.

[0407] No significant inhibition by other human or murine IL-1 family members including IL-1β, IL-1 receptor antagonist, IL-18, or human TNF.

### BIAcore Kinetic Analysis:

[0408] The calculated kinetic dissociation constant (K_{D}), association rate constant (kₐ) and dissociation rate constant (k_{d}) are summarised in Table 25.

TABLE 25
Kinetic constants determined by BIAcore analysis

| kₐ (M · s⁻¹) | k_{d} (s⁻¹) | K_{D} (M) | χ² |
|---|---|---|---|
| 2.0 × 10⁶ | 2.7 × 10⁻² | 1.3 × 10⁻⁸ | 7.9 |

### F. Domain Antibody: ABT1-122

### Library: 4G K

[0409] Amino Acid Sequence: (diversified residues are indicated in bold; the CDRs are underlined)

DIQMTQSPSSLSASVGDRVTITCRASQPIWTELNWYQQKPGKAPKLLIY
GSSSLQSGVPRFSGSGSGTDFTLTISSLQPEDFATYYCQQFAYFPATFGQ
GTKVEIKR

### Calculated MW: 11824 Da

### MRC5 ND₅₀: 50 nM

### Specificity: IL-1α.

[0410] No significant inhibition by other human or murine IL-1 family members including IL-1β, IL-1 receptor antagonist, IL-18, or human TNF.

### BIAcore Kinetic Analysis:

[0411] The calculated kinetic dissociation constant (K_{D}), association rate constant (kₐ) and dissociation rate constant (k_{d}) are summarised in Table 26.

TABLE 26
Kinetic constants determined by BIAcore analysis

| kₐ (M · s⁻¹) | k_{d} (s⁻¹) | K_{D} (M) | χ² |
|---|---|---|---|
| 6.6 × 10⁶ | 0.28 | 4.2 × 10⁻⁸ | 2.4 |

### G. Domain Antibody: ABT1-141

### Library: 4G K

[0412] Amino Acid Sequence: (diversified residues are indicated in bold the CDRs are underlined)

DIQMTQSPSSLSASVGDRVTITCRASQWIQKQLAWYQQKPGKAPKLLIY
SSSYLQSGVPRFSGSGSGTDFTLTISSLQPEDFATYYCQQHLRVPFTFG
QGTKVEIKR

### Calculated MW: 11998 Da

### MRC5 ND₅₀: 50 nM

### Specificity: IL-1α.

[0413] No significant inhibition by other human or murine IL-1 family members or human TNF.

### BIAcore Kinetic Analysis:

[0414] The calculated kinetic dissociation constant (K_{D}), association rate constant (kₐ) and dissociation rate constant (k_{d}) are summarised in Table 27.

TABLE 27
Kinetic constants determined by BIAcore analysis

| kₐ (M · s⁻¹) | k_{d} (s⁻¹) | K_{D} (M) | χ² |
|---|---|---|---|
| 1.3 × 10⁴ | 3.9 × 10⁻³ | 3.0 × 10⁻⁷ | 5.7 |

### H. Domain Antibody: ABT2-13

### Library: 4G H11

[0415] Amino Acid Sequence: (diversified residues are indicated in bold; the CDRs are underlined. A single V to A framework 2 mutation is highlighted in parentheses)

EVQLLESGGGLVQPGGSLRLSCAASGFTFRDYVMYW(A)RQAPGKGLEWV
SRIDPMGSSTYYADSVKGRFTISRDNSKNTLYLQMNSLRAEDTAVYYCAK
PEGNFDYWGQGTLVTVSS

### Calculated MW: 12796 Da

### MRC5 ND₅₀: ˜1000 nM

### Specificity: IL-1β.

[0416] No significant inhibition by other human or murine IL-1 family members including IL-1α, IL-1 receptor antagonist, IL-18, or human TNF.

### BIAcore Kinetic Analysis:

[0417] The calculated kinetic dissociation constant (K_{D}), association rate constant (kₐ) and dissociation rate constant (k_{d}) are summarise in Table 28.

TABLE 28
Kinetic constants determined by BIAcore analysis

| kₐ (M · s⁻¹) | k_{d} (s⁻¹) | K_{D} (M) | χ² |
|---|---|---|---|
| 8.1 × 10⁴ | 7.5 × 10⁻² | 9.3 × 10⁻⁷ | 0.03 |

### I. Domain Antibody: ABT2-42

### Library: 4G K

[0418] Amino Acid Sequence: (diversified residues are indicated in bold; the CDRs are underlined. A single K to T framework 2 mutation is highlighted in parentheses)

DIQMTQSPSSLSASVGDRVTITCRASQYIEKWLTWYQQKPGKAP(T)LLI
YRGSLLQSGVPRFSGSGSGTDFTLTISSLQPEDFATYYCQQTEYWPFTFG
QGTKVEIKR

### Calculated MW: 12100 Da

### MRC5 ND₅₀: 770 nM

### Specificity: IL-1β.

[0419] No significant inhibition by other human or murine IL-1 family members including IL-1α, IL-1 receptor antagonist, IL-18, or human TNF.

### BIAcore Kinetic Analysis:

[0420] The calculated kinetic dissociation constant (K_{D}), association rate constant (kₐ) and dissociation rate constant (k_{d}) are summarised in Table 29.

TABLE 29
Kinetic constants determined by BIAcore analysis

| kₐ (M · s⁻¹) | k_{d} (s⁻¹) | K_{D} (M) | χ² |
|---|---|---|---|
| 2.5 × 10³ | 0.13 | 5.4 × 10⁻⁵ | 0.02 |

### J. Domain Antibody: ABT2-46

### Library: 4G K

[0421] Amino Acid Sequence: (diversified residues are indicated in bold; the CDRs are underlined)

DIQMTQSPSSLSASVGDRVTITCRASQSIIEWLSWYQQKPGKAPKLLIY
RTSVLQSGVPSRFSGSGSGTDFTLTISSLQPEDFATYYCQQNEFWPFT
FGQGTKVEIKR

### Calculated MW: 12049 Da

### MRC5 ND₅₀: 386 nM

### Specificity: IL-1β.

[0422] No significant inhibition by other human or murine IL-1 family members including IL-1α, IL-1 receptor antagonist, IL-18, or human TNF.

### BIAcore Kinetic Analysis:

[0423] The calculated kinetic dissociation constant (K_{D}), association rate constant (kₐ) and dissociation rate constant (k_{d}) are summarised in Table 30.

TABLE 30
Kinetic constants determined by BIAcore analysis

| kₐ (M · s⁻¹) | k_{d} (s⁻¹) | K_{D} (M) | χ² |
|---|---|---|---|
| 2.3 × 10⁴ | 6.3 × 10⁻² | 2.8 × 10⁻⁶ | 0.04 |

### K Domain Antibody: ABT2-65

### Library: 4G H18

[0424] Amino Acid Sequence: (diversified residues are indicated in bold; the CDRs are underlined. A single N to D framework 3 mutation is highlighted in parentheses).

EVQLLESGGGLVQPGGSLRLSCAASGFTFEDYQMGWVRQAPGKGLEWV
SSISAMGNRTYYADSVKGRFTISRD(D)SKNTLYLQMNSLRAEDTAVYY
CAKNLVRTQSKMWMFDYWGQGTLVTVSS

### Calculated MW: 13672 Da

### MRC5 ND₅₀: 266 nM

### Specificity: IL-1β.

[0425] No significant inhibition by other human or murine IL-1 family members including IL-1α, IL-1 receptor antagonist, IL-18, or human TNF.

### BIAcore Kinetic Analysis:

[0426] The calculated kinetic dissociation constant (K_{D}), association rate constant (kₐ) and dissociation rate constant (k_{d}) are summarise in Table 31.

TABLE 31
Kinetic constants determined by BIAcore analysis

| kₐ (M · s⁻¹) | k_{d} (s⁻¹) | K_{D} (M) | χ² |
|---|---|---|---|
| 2.5 × 10⁵ | 2.0 × 10⁻² | 9.7 × 10⁻⁸ | 0.32 |

### L. Domain Antibody: ABT2-76

### Library: 4G K

[0427] Amino Acid Sequence: (diversified residues are indicated in bold; the CDRs are underlined)

DIQMTQSPSSLSASVGDRVTITCRASQSIDRWLAWYQQKPGKAPKLLIY
RGSILQSGVPSRFSGSGSGTDFTLTISSLQPEDFATYYCQQVAFWPPT
FGQGTKVEIKR

### Calculated MW: 11908 Da

### MRC5 ND₅₀: 456 nM

### Specificity: IL-1β.

[0428] No significant inhibition by other human or murine IL-1 family members including IL-1α, IL-1 receptor antagonist, IL-18, or human TNF.

### BIAcore Kinetic Analysis:

[0429] The calculated kinetic dissociation constant (K_{D}), association rate constant (kₐ) and dissociation rate constant (k_{d}) are summarise in Table 32.

TABLE 32
Kinetic constants determined by BIAcore analysis

| kₐ (M · s⁻¹) | k_{d} (s⁻¹) | K_{D} (M) | χ² |
|---|---|---|---|
| 2.0 × 10⁴ | 2.7 × 10⁻² | 1.3 × 10⁻⁶ | 0.99 |

### M Domain Antibody: ABT2-108

### Library: 4G H17

[0430] Amino Acid Sequence: (diversified residues are indicated in bold; the CDRs are underlined)

EVQLLESGGGLVQPGGSLRLSCAASGFTFAEYTMMWVRQAPGKGLEWV
SRIGQDGKNTYYADSVKGRFTISRDNSKNTLYLQMNSLRAEDTAVYYCA
KYTGRVGVHHLFDYWGQGTLVTSS

### Calculated MW: 13471 Da

### MRC5 ND₅₀: 200 nM

### Specificity: IL-1β.

[0431] No significant inhibition by other human or murine IL-1 family members including IL-1α, IL-1 receptor antagonist, IL-18, or human TNF.

### BIAcore Kinetic Analysis:

[0432] The calculated kinetic dissociation constant (K_{D}), association rate constant (kₐ) and dissociation rate constant (k_{d}) are summarised in Table 33.

TABLE 33
Kinetic constants determined by BIAcore analysis

| kₐ (M · s⁻¹) | k_{d} (s⁻¹) | K_{D} (M) | χ² |
|---|---|---|---|
| 2.9 × 10⁴ | 3.1 × 10⁻³ | 1.1 × 10⁻⁷ | 0.06 |

[0433] Tables 62 and 63 provide an overview of the characteristics of the IL-1α (ABT1) dAbs and IL-1β dAbs, respectively. In addition, the sequences of all of the dAb variable heavy and light chains identified herein are provided in Table 64.

### Example 4

### Construction of Expression Vectors (P-Ef-Bos) for Recombinant Antibody Expression

[0434] A panel of expression vectors, also referred to herein as master template plasmids or master templates, for the expression of recombinant human and mouse IgG were constructed from pre-existing antibody constructs. The purpose of making these master templates was to generate a panel of improved expression vectors, i.e., improved pEF-BOS-based cloning vectors, for mammalian expression of recombinant human and mouse IgGs in transiently transfected COS cells. The pEF-BOS vector was originally described in Mizushima and Nagata, pEF-BOS, a powerful mammalian expression vector. Nucleic Acids Res, 1990. 18(17): p. 5322.

[0435] The constructed mammalian expression vectors described herein, all have a 1-kb stuffer sequence in between an upstream signal peptide leader sequence and a downstream Ig constant region sequence. In order to make an antibody heavy or light chain construct, the stuffer sequence in the chosen master template is removed by restriction enzyme digestion followed by inserting the desired antibody V domain sequence (VH, Vκ, or Vγ). The resulting plasmid constructs are easily proprigated in and purified from E. coli and can be used to express antibody by co-transfecting both a heavy chain and a light chain construct in COS cells.

### Mouse Master Template Constructions

[0436] Master templates for mouse IgGs were constructed by first introducing both FspA I and Afe I sites in between the signal peptide leader sequences and the constant regions and subclone the amplified products into the Srf I and Not I sites of pEF-BOS vector backbone. The four primers used for pBOS-mCκ overlapping PCR were pEF-BOS-Fwd, mCkappa-Rev, mCkappa-Fwd, and pEF-BOS-Rev using pA534 and pA246 DNA as templates. For pBOS-mCγ1, the primers were pEF-BOS-Fwd, mIgG1-Rev, mIgG1-Fwd, pEF-BOS-Rev and the templates was pA245. Similarly, the primers for pBOS-mCγ2a were pEF-BOS-Fwd, mIgG2a-Rev, mIgG2a-Fwd, and pEF-BOS-Rev using templates pA245 and pA239. After the first step, a blunt-end stuffer sequence, which was amplified by LambdaStuffer-Fwd and -Rev primers from λ/Hind III digested DNA markers, was inserted into these constructs linearized by FspA I and Afe I to create the final mouse master templates.

### Human Master Template Constructions

[0437] Human heavy chain master templates were constructed by one of two methods. For pBOS-hCγ1,z,non-a and pBOS-hCγ1,z,non-a,mut(234,235) constructs, a heavy chain leader sequence was linked to the stuffer sequence by overlapping PCR using primers pEF-BOS-Fwd, SHS-Rev, SHS-Fwd, and hCGamma1-Rev and the template vectors. The resulting PCR products were than inserted into pBOS backbone vectors, via Srf I and Sal I sites. For pBOS-hCγ1,z,non-a,mut(234,237), a stuffer sequence was amplified by SHS-Fwd and hCGamma1-Rev primers, digested by Sal I, and subcloned into Nru I and Sal I-digested vector. The pBOS-hCγ1,z,a, pBOS-hCγ4, and pBOS-hCγ2(n−) were made by subcloning the Sal I and Not I digested constant regions from constant chain containing vectors, and an RT-PCR product from transiently transfected COS cells expressing IgG2 into pBOS-hCγ1,z,non-a,mut(234,237) linearized by Sal I and Not I.

[0438] For the pBOS-hCγ2, (n+) construct, a GVE to GME amino acid change was introduced into the IgG2 Fc region in the pBOSAB198G2WT template via overlapping PCR using primers 5′Sal198, 3Sal198, 5′GME198, and 3′BSR198. Product from this overlapping PCR served as template for the next round of overlapping PCR to introduce a PSS to TSS amino acid change in the IgG2 Fc region using primers 5′Sal198, 3′TSS198, 5′BSR198, and 3′BSR198. This PCR product was then inserted back into the pBOSAB198G2WT via BsrG I and Sal I sites. Finally, the IgG2(n+) constant region from this vector was excised and inserted into pBOS-hCγ2(n−) via Sal I and Not I sites to generate the pBOS-hCγ2(n+) construct.

[0439] Using pEF-BOS-Fwd, SLS-Rev, SLS-Fwd, hCkappa-Rev2, hCkappa-Fwd2, and pEF-BOS-Rev primers and DNA templates, the human κ light chain master template was made by two overlapping PCRs linking a K leader sequence to the stuffer sequence then to the human κ constant region before cloning the final product into Srf I and Not I-lineared pEF-BOS-based backbone.

[0440] Similarly, for pBOS-hCλ master template construction, primers pEF-BOS-Fwd, LambdaSignal-Rev, LambdaSignal-Fwd, hCLambda-Rev, hCLambda-fwd and pEF-BOS-Rev were used to amplify λ light chain leader sequence, the stuffer sequence, and human λ light chain constant region sequence together using templates in two overlapping PCRS. The final product was cloned into Srf I and Not I-lineared pEF-BOS-based backbone. PCR primers used in the construction of the vectors are described in Table 34.

TABLE 34
PCR primers used in constructing pEF-BOS
master templates

| Name | Oligo Sequence |
|---|---|
| StufferLightSignal | TCGGCATACCATGCGCATCGCGAGCCGGGGAA |
| (SLS)-Rev | CCAC |
| StufferLightSignal | CGATGCGCATGGTATGCCGAAAGGGATGC |
| (SLS)-Fwd | |
| StufferHeavySignal | GCACTGGACACCTTTTAAAATCGCG |
| (SHS)-Rev | |
| StufferHeavySignal | CGATTTTAAAAGGTGTCCAGTGCGCATGGTAT |
| (SHS)-Fwd | GCCGAAAGGGATGC |
| pEF-BOS-Rev | GGAGACCTGATACTCTCAAG |
| pEF-BOS-Fwd | TCAGGTGTCGTGAGGAAT |
| mIgG2a-Rev | GTTTTAGCGCTACACTGGACACCTTTTAAAAT |
| | CGCG |
| mIgG2a-Fwd | GGTGTCCAGTGTAGCGCTAAAACAACAGCCCC |
| | ATCG |
| mIgG1-Rev | CGTTTTAGCGCTACACTGGACACCTTTTAAAA |
| | TCG |
| mIgG1-Fwd | GGTGTCCAGTGTAGCGCTAAAACGACACCCCC |
| | ATC |
| mCkappa-Rev | GCAGCATCAGCGCTGCATCGCGAGCCGGGGAA |
| | CCAC |
| mCkappa-Fwd | GGCTCGCGATGCAGCGCTGATGCTGCACCAAC |
| | TG |
| LambdaStuffer-Rev | GCTTGTCACCCAGGAACG |
| LambdaStuffer-Fwd | CGAAAGGGATGCTGAAATTGAG |
| LambdaSignal-Rev | CATCCCTTTCGCGATAAGCTTCCTGTGCAG |
| LambdaSignal-Fwd | GAAGCTTATCGCGAAAGGGATGCTGAAATTG |
| | AG |
| hCLambda-Rev | GCCTTGGGTTAACGCTTGTCACCCAGGAACG |
| hCLambda-Fwd | GGTGACAAGCGTTAACCCAAGGCTGCCCCCTC |
| | GGTC |
| hCkappa-Rev2 | CAGCCACCGTACGTAGCTTGTCACCCAGGAA |
| | CG |
| hCkappa-Fwd2 | GTGACAAGCTACGTACGGTGGCTGCACCATC |
| | TG |
| hCGamma1-Rev | CTTGGTCGACGCGCTTGTCACCCAGGAACG |
| hCGamma1-Fwd | GGTGACAAGCGCGTCGACCAAGGGCCCATCGG |
| | TC |
| 5′Sal198 | TCTACGACTACGGTATGGACGTCTGG |
| 3′Sal198 | GCCGTCCACGTACCAGTTGAAC |
| 5′BSR198 | CCTCCAGCAACTTCGGCACCCAGACCTAC |
| 3′BSR198 | ACCTGGTTCTTGGTCATCTCCTCCC |
| 5′GME198 | GTTCAACTGGTACGTGGACGGCATGGAGGTG |
| 3′TSS198 | GTAGGTCTGGGTGCCGAAGTTGCTGGAGGTCA |
| | CGGTCAC |

### Condition for DNA Amplification by PCR

[0441] All PCRs were carried out in an MJ Research DNA engine tetrad 2 thermal cycler equipped with stainless steel heating blocks. The proofreading Pfu Turbo Hotstart DNA polymerase (Stratagene) and its accompanying buffer were used for DNA amplification to minimize undesired sequence mutation and generate blunt-ended products. Typical thermal cycling condition was an initial DNA template denaturation at 94° C. for 2 minutes; followed by 30 thermal cycles of 94° C. for 20 seconds, 55° C. for 20 seconds, and 72° C. for 1 minute per kb; finished up by an additional 5 minutes at 72° C. and kept at 4° C. forever.

### Sequencing Confirmation

[0442] All constructed master templates were sequenced and confirmed in the region between the Srf I and Not I cloning sites using primers pEF-BOS-Fwd, pEF-BOS-Rev, and Lambda844. Twenty two additional primers as listed in Table 35 were used to obtain the vector backbone sequence in both DNA strands of pBOS-mCκ. This sequence was then applied to all master templates for their electronic DNA sequence files by Vector NTI software package.

TABLE 35
Sequencing primers for pEF-BOS vector backbone

| Name | Oligo Sequence |
|---|---|
| Lambda844 | AAGCGTTTCACTAATGGGCG |
| F1042 | ATAAGCGGCCGCGACTCTAGAG |
| F1541 | TCACCCTCCACCTCTTCACC |
| F2058 | GGACTCCAACGTCAAAGGG |
| F2538 | AAACGCGCGAGACGAAAGG |
| F3071 | AAAGCATCTTACGGATGG |
| F3553 | ATGAACGAAATAGACAGATCGC |
| F4068 | TTACCGGATAAGGCGCAG |
| F4557 | ATACGCAAACCGCCTCTC |
| F5060 | TTGCAGCTAATGGACCTTCTAG |
| F5551 | AATCTGGTGGCACCTTCGCG |
| F6068 | TTCTCGAGCTTTTGGAGTACG |
| R1527 | GGGTGACAGTGGAGCTTCCT |
| R2023 | ACTCTTGTTCCAAACTGG |
| R2530 | TCTCGCGCGTTTCGGTGATG |
| R3056 | TGCTTTTCTGTGACTGGTGAG |
| R3535 | CATCCATAGTTGCCTGACTCC |
| R4036 | TCCAACCCGGTAAGACACG |
| R4552 | AGGCGGTTTGCGTATTGGGC |
| R5051 | CCATTAGCTGCAAAGATTCCTC |
| R5548 | AAGGTGCCACCAGATTCGC |
| R6051 | GAACTAATCGAGGTGCCTGG |
| R6300 | ATGGATCTCGAGGTCGAGGG |

### Results

### Mouse Master Templates

[0443] Three mouse master templates were made: pBOS-mCκ, pBOS-mCγ1, and pBOS-mCγ2a. Sequences for the murine vectors are described in SEQ ID NOs 844 to 855 and provided in Table 36.

TABLE 36
Table of sequences and corresponding vectors

| SEQ ID | VECTOR NAME and CONSTANT REGION |
|---|---|
| NO | (constant region and stuffer sequences indicated) |
| 855 | pBOS-hCg1, z, a- |
| | (Constant region nt 1101 to 2093; stuffer sequence nt 124-1103) |
| 844 | pBOS-hCg1, z, non-a, mut (234, 235) |
| | (Constant region nt 1101 to 2093; stuffer sequence nt 124-1100) |
| 845 | pBOS-hCg1, z, non-a, mut (234, 237) |
| | (Constant region nt 1101 to 2093; stuffer sequence nt 124-1100) |
| 846 | pBOS-hCg1, z, non-a |
| | (Constant region nt 1101 to 2093; stuffer sequence nt 124-1100) |
| 847 | pBOS-hCg2, (n−) |
| | (Constant region nt 1101 to 2081; stuffer sequence nt 124-1100) |
| 848 | pBOS-hCg2, (n+) |
| | (Constant region nt 1101 to 2081; stuffer sequence nt 124-1100) |
| 849 | pBOS-hCg4 |
| | (Constant region nt 1101 to 2084; stuffer sequence nt 124-1100) |
| 850 | pBOS-hCk |
| | (Constant region nt 1114 to 1434; stuffer sequence nt 132-1100) |
| 851 | pBOS-hCl |
| | (Constant region nt 1095-1412; stuffer sequence nt 127-1095) |
| 852 | pBOS-mCg1 |
| | (Constant region nt 1101 to 2075; stuffer sequence nt 124-1100) |
| 853 | pBOS-mCg2a |
| | (Constant region nt 1101 to 2093; stuffer sequence nt 124-1100) |
| 854 | pBOS-mCk |
| | (Constant region nt 1109 to 1429; stuffer sequence nt 132-1108) |

[0444] The pBOS-mCκ may be used for cloning mouse Vκ region sequence for expressing a mouse Ig light chain, while pBOS-mCγ1 and pBOS-mCγ2a may be used for cloning mouse V_{H} sequence for expressing a heavy chain with a γ1 and γ2a constant region, respectively. The 1-kb λ stuffer sequence in all three master templates can be released from the master template DNA by FspA I and Afe I (or Eco47 III) restriction enzymes. There is an Nru I site upstream of the FspA I site that can be used also. The resulting linearized vectors will have blunt ends at both 5′ and 3′ ends and are ready for ligation with blunt-ended V region sequences. If PCR amplification method is used to prepare the V region for subcloning, Pfu DNA polymerase or other DNA polymerases that produce blunt-end products should be used and the products need to be phosphorylated prior to ligating to the linearized and dephosphorylated pBOS vectors. Alternatively, bacterial homologous recombination can be used to subclone the desired V region into the pBOS master templates easily. For this approach, the V region amplification forward primer should have additional 30 nucleotides at the 5′ end that overlaps with the 3′ end of leader sequence in the vector, and the reverse primer should have additional 30 nucleotides at the 3′ end that overlaps with the 5′ end of the constant region sequence. After PCR amplification, the amplified V region products are gel-purified and mixed with the linearized vector DNA at greater than 5 to 1 molar ratio and co-transformed into a recombination-capable competent cells. The DH5α competent cells sold by Invitrogen work well for this purpose. A schematic showing the design and use of mouse pBOS templates is described in FIG. 18.

### Human Master Templates

[0445] Table 37 lists the eight human pBOS master templates. The pBOS-hCκ template can be linearized by FspA I and BsiW I enzymes to remove the λ stuffer sequence and ligated to a Vκ sequence for kappa light chain expression (see FIG. 18B). Alternative 5′ Nru 1 and 3′ SnaB I restriction enzyme sites are available for cloning purpose if FapA I or BsiW I site is present in the Vκ sequence and thus prevents their use in cloning work. The pBOS-hCλ should be linearized by Nru I and Hpa I and ligated to Vλ sequence (FIG. 18B). Alternatively, the linearized vector can be homologously recombined with the Vλ sequence in bacteria as described in 5.1 to avoid the use of less efficient blunt-end ligation process or the presence of either Nru I or Hpa I site in the Vλ sequence. It should be noted that the creation of the Hpa I site at the 5′ end of Cλ requires the creation of a C to T point mutation and this mutation must be corrected back to a C in the Vλ sequence to be ligated to the vector backbone. Keeping this mutation in the constructed plasmid will result in truncated open reading frame as the C to T mutation created a termination codon at the 5′ end of Cλ.

[0446] All six human Ig heavy chain pBOS master templates can be used by the same cloning strategy. They all can be lineared by FspA I and Sal I restriction enzyme digestions and ligated to a VH sequence that has compatible ends (FIG. 18B). Again, there is an available Nru I site upstream of the FspA I site as an alternative cloning site.

TABLE 37
List of human pBOS master templates

| Template Name | Isotype | Allotype | Mutations |
|---|---|---|---|
| pBOS-hCκ | Kappa | | |
| pBOS-hCλ | Lambda | | |
| pBOS-hCγ1, z, a | Gamma1 | z, a | |
| pBOS-hCγ1, z, non-a | Gamma1 | z, non-a | |
| pBOS-hCγ1, z, non-a, | Gamma1 | z, non-a | a.a. 234 -> Ala, |
| mut(234, 235) | | | a.a. 235 -> Ala |
| pBOS-hCγ1, z, non-a, | Gamma1 | z, non-a | a.a. 234 -> Ala, |
| mut(234, 237) | | | a.a. 237 -> Ala |
| pBOS-hCγ2 (n−) | Gamma2 | n− | |
| pBOS-hCγ2 (n+) | Gamma2 | n+ | |
| pBOS-hCγ4 | Gamma4 | | |

pEF-BOS Vector Backbone

[0447] The pBOS-mCκ was submitted for complete double-strand sequencing using primers listed in the methods section. A sequence contig was assembled and used as the template to generate all pBOS templates' electronic sequence file in Vector NTI program. Other than several single base-pair differences and difference in the length of a poly-A region, there was no major difference from the old pEF-BOS vector sequence. The new vector backbone sequence is a perfect match to the pUC119 plasmid sequence from which the pEF-BOS was derived (Mizushima and Nagata, pEF-BOS, a powerful mammalian expression vector. Nucleic Acids Res, 1990. 18(17): p. 5322).

[0448] The master templates described herein provide a 1-kb stuffer sequence unrelated to any Ig sequence in the vector. The 1-kb stuffer facilitates restriction enzyme digestion, easy removal by gel purification, and identifying correct clones from background colonies after transformation by either colony PCR or restriction digestion of miniprep DNAs.

### Example 5

### Expression of Paired Single Domain Antibodies as a Functional IL-1α and Il-1βDual-Specific Molecule

[0449] The overall objective of the study was to generate a dual-specific antibody that can bind and neutralize both IL-1α and β. Previous studies combined separate VH or VL dAbs with affinities for either IL-1α or IL-1β into a dual-specific IgG or IgG-like molecule that binds and neutralizes both IL-1α and β. Initial attempts to pair VH/VH or VL/VL to generate IgG-like proteins had poor yields and unpaired heavy/light chains using a COS cell expression system. This example provides an alternative format for expressing VH/VH or VL/VL single chain-Fc fusion proteins by directly pairing two dAbs with an inflexible linker and fused to a human IgG1 Fc region.

[0450] The purpose of the study was to determine if scFv-Fc fusion constructs could be made by linking an IL-1α and an IL-1β-specific VH dAb together, and if these constructs could maintain high neutralization potencies for both IL-1α and IL-1β in a bioassay. Constructs pairing ABT2-108-538x (an IL-1β specific VH dAb) with ABT1-207 or ABT1-98 (IL-1α specific VH dabs) were generated and analyzed to test this approach.

### Materials and Methods

[0451] VH dAbs ABT2-108-538, ABT1-207, ABT1-98 were amplified from their corresponding pBOS plasmid constructs via PCR using primers SCFCVH 5′ and GSBAMVH 3′, resulting in the addition of a 3′ (Gly₄Ser)₃ linker, and gel purified. The Fc region was amplified from pBOS-hCg1,z,non-a via PCR using primers FCBAMB 5′ and 1926 3′, resulting in the addition of an overlapping 5′ (Gly₄Ser)₃ linker, and gel purified. Overlapping PCR using the purified VH-(Gly₄Ser)₃ and (Gly₄Ser)₃-FC PCR products and primers SVFVH 5′ and 1926 3′ was performed, and the resulting products gel purified. The VH-FC fusions were inserted into vectors pBOS-ABT1-98, pBOS-ABT1-207, and pBOS-ABT2-108-538x via Not I and Sal I sites to generate constructs pBOS-1-98/2-108-538x-scFc, pBOS-1-207/2-108-538x-scFc, pBOS-2-108-538x/1-98-scFc, and pBOS-2-108-538x/1-207-scFc (FIG. 19). ScFc protein (scFc=ScFv-Fc fusion construct) for each construct was generated by transfecting the constructed plasmids into COS cells and purifying proteins using protein A column chromatography. The purified proteins were quantified by BCA assay using BSA as standard and also separated on reducing and non-reducing SDS-PAGE gels. Purified scFc proteins were tested for neutralization potencies against both IL-1α and IL-1β in MRC-5 assays.

TABLE 38
Primers used in PCR to generate scFc constructs

| Primer name | Sequence |
|---|---|
| SCFCVH 5′ | Gactgcgtcgacgcgtacggaggtgcagctgttggagt |
| | ctggg |
| GSBAMVH 3′ | tccacctccaccggatccaccacctccgctcgagacg |
| | gtgaccagggttccctg |
| FCBAMB 5′ | ggaggtggtggatccggtggaggtggatctggtggtggt |
| | ggatcacccaaatcttgtgacaaaactcacacatgccca |
| 1926 3′ | Ggagacctgatactctcaag |

### Results

[0452] The purified scFc protein for all 4 constructs produced well in COS cells, and gave one uniform band of slightly more than 100 kDa unreduced and 50 kDa reduced by SDS-PAGE. Protein yields are described below in Table 39.

TABLE 39
Protein yields of scFc constructs

| | Protein yield |
|---|---|
| ScFc Construct | (per L supernatant) |
| ABT1-98/2-108-538 | 6.2 mg |
| ABT1-207/2-108-538 | 4.6 mg |
| ABT2-108-538/1-98 | 4.4 mg |
| ABT2-108-538/1-207 | 1 mg |

Table 40 show the results of the MRC-5 assays, using MAB200 and MAB201 as reference antibodies, to measure IL-1α and β neutralization potencies of the scFc proteins

TABLE 40
Estimated EC50 for IL-1α and IL-β neutralization from MRC-5 assays

| Protein | IL-1α (nM) | IL-1β (nM) |
|---|---|---|
| ABT1-98/ABT2-108-538x | 30 | 1.3 |
| ABT1-207/ABT2-108-538x | 25 | 1.1 |
| ABT2-108-538x/ABT1-98 | 3 | <0.001 |
| ABT2-108-538x/ABT1-207 | 50 | 0.002 |
| MAB200 | 0.17 | — |
| MAB201 | — | 0.005 |

[0453] All scFc constructs generated showed neutralization for both IL-1α and β. The order of the VH dabs in the scFc construct seemed to impact their neutralization potencies, however. For instance, ABT2-108-538x lost about 3 logs of potency against IL-1β when it was placed in between an N-terminal IL-1α dAb and a C-terminal Fc in the scFc construct than if it was placed N-terminal to both the IL-1α dAb and the Fc. The placement of the IL-1α dAb in the scFc construct seemed to have less impact on the neutralization potency. In the case of ABT1-98, it lost about one log of IL-1α neutralization potency going from the C-terminal to the N-terminal VH position in the scFc, whereas ABT1-207 lost about 2-fold potency going from the N-terminal to the C-terminal VH in the scFc construct with the IL-1β VH2-108-538x. The scFv construct that showed the best neutralization potency for both IL-1α and β was ABT2-108-538x/ABT1-98, with EC50s of ˜3 nM against IL-1α and less than 1 pM against IL-1β

### Summary of Variable Domain Pairing and Neutralization Data

[0454] Table 41 describes 10 Fab molecules that were specific to IL-1α/IL-1β and were also able neutralizing in a standard MRC5 in vitro bioassay. In addition, Fab molecule ABT1-6-23/ABT2-13 was effective at neutralizing with respect to IL-1α, however the molecule was not been tested at a sufficient concentration to determine a value for IL-1β neutralisation. For each clone described herein, the first part its name relates to its specificity (IL-1α represented by ABT1; and IL-1β represented by ABT2).

TABLE 41
Summary of the most potent IL-1 neutralising dAb pairing as determined
in the MRC5 bioassay. Clone ABT1-6-23 is an affinity matured clone
derived from the parental ABT1-6.

| Fab pairing | dAb type | Fab IL-1α ND₁₀ | | Fab IL-1β ND₁₀ | |
|---|---|---|---|---|---|
| ABT1-96/ABT2-42 | VH/VK | 3 | nM | 10 | nM |
| ABT1-122/ABT2-108 | VK/VH | 3 | nM | 50 | nM |
| ABT1-141/ABT2-108 | VK/VH | 10 | nM | 15 | nM |
| ABT1-96/ABT2-13 | VH/VH | 0.9 | nM | 80 | nM |
| ABT1-6-23/ABT2-46 | VH/VK | 4 | nM | 150 | nM |
| ABT1-141/ABT2-65 | VK/VH | 80 | nM | 300 | nM |
| ABT1-96/ABT2-46 | VH/VK | 6 | nM | 400 | nM |
| ABT1-95/ABT2-13 | VK/VH | 200 | nM | 400 | nM |
| ABT1-122/ABT2-65 | VK/VH | 40 | nM | 1500 | nM |
| ABT1-98/ABT2-76 | VH/VK | 100 | nM | 1500 | nM |
| ABT1-6-23/ABT2-13 | VH/VH | 40 | nM | >500 | nM |

A summary of the IL-1α and IL-1β pairs is described in more detail below and is also described above in Table 9.
Pairing ABT1-122 with ABT2-108
The ND₁₀ and ND₅₀ values determined from the MRC5 IL-1α and IL-1β neutralisation assay data are summarised in Table 42.

TABLE 42
ND₅₀ and ND₁₀ values for the dAb and Fab molecules.

| Clone Name | ND₁₀ IL-1α | ND₅₀ IL-1α | ND₁₀ IL-1β | ND₅₀ IL-1β |
|---|---|---|---|---|
| dAb ABT1-122 | 9 nM | 50 nM | — | — |
| dAb ABT2-108 | — | — | 150 nM | 250 nM |
| Fab | 3 nM | 60 nM | 50 nM | 150 nM |

Pairing ABT1-141 with ABT2-108

[0455] The ND₁₀ and ND₅₀ values determined from the MRC5 IL-1α and IL-1β neutralisation assay data are summarised in Table 43.

TABLE 43
ND₅₀ and estimated ND₁₀ values for the dAb and Fab molecules.

| Clone Name | ND₁₀ IL-1α | ND₅₀ IL-1α | ND₁₀ IL-1β | ND₅₀ IL-1β |
|---|---|---|---|---|
| dAb ABT1-141 | 10 nM | 70 nM | — | — |
| dAb ABT2-108 | — | — | 150 nM | 250 nM |
| Fab | 10 nM | 150 nM | 15 nM | 40 nM |

Pairing ABT1-96 with ABT2-42
The ND₁₀ and ND₅₀ values determined from the MRC5 IL-1α and IL-1β neutralisation assay data are summarised in Table 44.

TABLE 44
ND₅₀ and estimated ND₁₀ values for the dAb and Fab molecules.

| Clone Name | ND₁₀ IL-1α | ND₅₀ IL-1α | ND₁₀ IL-1β | ND₅₀ IL-1β |
|---|---|---|---|---|
| dAb ABT1-96 | 3 nM | 11 nM | — | — |
| dAb ABT2-42 | — | — | 100 nM | 770 nM |
| Fab | ~3 nM | 30 nM | ~10 nM | 150 nM |

Pairing ABT1-141 with ABT2-65
The ND₁₀ and ND₅₀ values determined from the MRC5 IL-1α and IL-1β neutralisation assay data are summarised in Table 45.

TABLE 45
ND₅₀ and estimated ND₁₀ values for the dAb and Fab molecules.

| Clone Name | ND₁₀ IL-1α | ND₅₀ IL-1α | ND₁₀ IL-1β | ND₅₀ IL-1β |
|---|---|---|---|---|
| dAb ABT1-141 | 10 nM | 70 nM | — | — |
| dAb ABT2-65 | — | — | 100 nM | 266 nM |
| Fab | 80 nM | 300 nM | 300 nM | 1000 nM |

Pairing ABT1-122 with ABT2-65
The ND₁₀ and ND₅₀ values determined from the MRC5 IL-1α and IL-1β neutralisation assay data are summarised in Table 46.

TABLE 46
ND₅₀ and estimated ND₁₀ values for the dAb and Fab molecules.

| Clone Name | ND₁₀ IL-1α | ND₅₀ IL-1α | ND₁₀ IL-1β | ND₅₀ IL-1β |
|---|---|---|---|---|
| dAb ABT1-122 | 9 nM | 50 nM | — | — |
| dAb ABT2-65 | — | — | 100 nM | 266 nM |
| Fab | 40 nM | 800 nM | 1500 nM | 5000 nM |

Pairing ABT1-96 with ABT2-13
The ND₅₀ and ND₅₀ values determined from the MRC5 IL-1α and IL-1β neutralisation assay data are summarised in Table 47.

TABLE 47
ND₅₀ and estimated ND₁₀ values for the dAb and Fab molecules.

| Clone Name | ND₁₀ IL-1α | ND₅₀ IL-1α | ND₁₀ IL-1β | ND₅₀ IL-1β |
|---|---|---|---|---|
| dAb ABT1-96 | 3 nM | 11 nM | — | — |
| dAb ABT2-13 | — | — | 100 nM | 800 nM |
| Fab | 0.9 nM | 7 nM | 80 nM | N.D. |

Pairing ABT1-95 with ABT2-13
The ND₁₀ and ND₅₀ values determined from the MRC5 IL-1α and IL-1β neutralisation assay are summarised in Table 48.

TABLE 48
ND₅₀ and estimated ND₁₀ values for the dAb and Fab molecules.

| Clone Name | ND₁₀ IL-1α | ND₅₀ IL-1α | ND₁₀ IL-1β | ND₅₀ IL-1β |
|---|---|---|---|---|
| dAb ABT1-95 | 150 nM | 700 nM | — | — |
| dAb ABT2-13 | — | — | 100 nM | ~800 nM |
| Fab | 200 nM | 600 nM | 400 nM | N.D. |

Pairing ABT1-96 with ABT2-46
The ND₁₀ and ND₅₀ values determined from the MRC5 IL-1α and IL-1β neutralisation assay data are summarised in Table 49.

TABLE 49
ND₅₀ and estimated ND₁₀ values for the dAb and Fab molecules.

| Clone Name | ND₁₀ IL-1α | ND₅₀ IL-1α | ND₁₀ IL-1β | ND₅₀ IL-1β |
|---|---|---|---|---|
| dAb ABT1-96 | 3 nM | 11 nM | — | — |
| dAb ABT2-46 | — | — | 70 nM | 386 nM |
| Fab | 6 nM | 40 nM | 400 nM | N.D. |

Pairing ABT1-6-23 with ABT2-46
The ND₁₀ and ND₅₀ values determined from the MRC5 IL-1α and IL-1β neutralisation assay data are summarised in Table 50.

TABLE 50
ND₅₀ and estimated ND₁₀ values for the dAb and Fab molecules.

| Clone Name | ND₁₀ IL-1α | ND₅₀ IL-1α | ND₁₀ IL-1β | ND₅₀ IL-1β |
|---|---|---|---|---|
| dAb | 3 nM | 30 nM | — | — |
| ABT1-6-23 | | | | |
| dAb ABT2-46 | — | — | 70 nM | 386 nM |
| Fab | 4 nM | 100 nM | 150 nM | 5000 nM |

Pairing ABT1-98 with ABT2-76
The ND₁₀ and ND₅₀ values determined from the MRC5 IL-1α and IL-1β neutralisation assay data are summarised in Table 51.

TABLE 51
ND₅₀ and estimated ND₁₀ values for the dAb and Fab molecules.

| Clone Name | ND₁₀ IL-1α | ND₅₀ IL-1α | ND₁₀ IL-1β | ND₅₀ IL-1β |
|---|---|---|---|---|
| dAb ABT1-98 | <100 nM | <100 nM | — | — |
| dAb ABT2-76 | — | — | 50 nM | 456 nM |
| Fab | 100 nM | 300 nM | 1500 nM | N.D. |

Pairing ABT1-6-23 with ABT2-13
The ND₁₀ and ND₅₀ values determined from the MRC5 IL-1α and IL-1β neutralisation assay data are summarised in Table 52.

TABLE 52
ND₅₀ and estimated ND₁₀ values for the dAb and Fab molecules.

| Clone Name | ND₁₀ IL-1α | ND₅₀ IL-1α | ND₁₀ IL-1β | ND₅₀ IL-1β |
|---|---|---|---|---|
| dAb | 3 nM | 30 nM | — | — |
| ABT1-6-23 | | | | |
| dAb ABT2-13 | — | — | 100 nM | 800 nM |
| Fab | 40 nM | 200 nM | >500 nM | >500 nM |

[0456] In conclusion, these results demonstrate that it is possible to use a scFv-Fc fusion construct to express two VH dAbs to two different antigens in one recombinant protein and maintain dual-specificity and high potency.

### Example 6

### Dual specific IL-1α/IL-1β IgGs

[0457] As described above, phage display and emulsion technologies and yeast display, together with rational mutagenesis, produced a range of improved dabs to IL-1α and IL-1β (some of which appeared to exceed the potency of the cell based assay, indicating that they have monomeric potencies in the very low picomolar or high femtomolar range). These dabs were then used these to create a panel of dual targeting IgGs.

[0458] Examples 6.1-6.2 provide experiments that show that using dabs identified and affinity matured, IgGs could be constructed that have sub-200 pM potencies to BOTH IL-1α and IL-1β, thus demonstrating that a fully human IgG can be generated that neutralises two separate targets as well as the best murine antibodies that are only able to neutralise one or the other target. Furthermore, in vitro these molecules inhibited IL-1 signalling better than the natural antagonist (IL-1ra) and yet did not bind to it, suggesting that in vivo the dual targeting IL-1 IgG should act in concert with IL-1ra.

[0459] The goal of the experiments in Example 6 was to provide a panel of IgGs that met the following criteria:
[0460] Two high-affinity Fab or Fab-like molecules, each with the following properties:
   [0461] K_{d} for IL-1α: 5×10⁻¹⁰M or lower
   [0462] K_{d} for IL-1β: 5×10⁻¹⁰M or lower k_{off} for IL-1α: 10⁻⁴ s⁻¹ or lower
   [0463] k_{off} for IL-1β: 10⁻⁴ s⁻¹ or lower
[0464] Two IgG molecules corresponding to re-cloned versions of the two Fab or Fab-like molecules described above, each with the following properties:
   [0465] IC₅₀ in RB assay for IL-1α: 9×10⁻¹⁰M or lower
   [0466] IC₅₀ in RB assay for IL-1β: 9×10⁻¹⁰M or lower
   [0467] ND₅₀ in MRC5 assay for IL-1α: 2×10⁻¹⁰M or lower
   [0468] ND₅₀ in MRC5 assay for IL-1β: 2×10⁻¹⁰M or lower

[0469] IgGs or Fabs containing the lead clones have also been tested in the Receptor Binding Assay (RBA) and the kinetics of their interaction with IL-1α and IL-1β were analysed using BIAcore.

[0470] The below experiments shows that multiple clones from the ABT1-95, ABT2-65 and ABT2-108 lineages formatted into IgGs meet the above criteria in the MRC5 and Receptor Binding Assays.

### Example 6.1

### MRC5 and Receptor Ligand Binding (RBA) Assay Data for IgG Pairings

[0471] Five clones ABT1-95, ABT1-122, ABT1-141, ABT2-65 and ABT2-108 were were paired as IgGs, and their inhibitory activity was tested in the MRC5 assay.

Table 53 contains a summary of the IgG pairings that were analysed in the MRC5 assay as the affinity maturation of each dAb progressed. This culminated in the identification of dual specific pairings that met the above criteria (ND₅₀ of <200 pM)—these are highlighted in bold in Table 53.

TABLE 53
Summary of the neutralisation of the dAb pairings as determined in
the MRC5 bioassay over the course of the maturation program.

| ABT1 clone | ABT2 clone | MRC5 IL-1α (nM) | MRC5 IL-1β (nM) |
|---|---|---|---|
| 1-95-A3 | 2-108-538X | 0.032 | 0.023 |
| 1-95-A3 | 2-65-166 | 0.017 | 0.15 |
| 1-95-A2 | 2-65-166 | 0.08 | 0.121 |
| 1-95-A5 | 2-65-166 | 0.014 | 0.197 |
| 1-95-A6 | 2-65-166 | 0.019 | 0.207 |
| 1-95-15 | 2-65-17 | 2.7 | 0.094 |
| 1-95-15 | 2-108-538X | 8 | 0.042 |
| 1-122-750X | 2-65-17 | 20 | 1 |
| 1-122-750X | 2-108-538X | 75 | 0.0094 |
| 1-122-511 | 2-108 | 80 | 8 |
| 1-122-511 | 2-108-538X | 259 | 0.009 |
| 1-95-3 | 2-108 | 300 | |
| 1-141-25 | 2-65-17 | 400 | 0.975 |
| 1-122 | 2-108-521 | 1000 | 1 |
| 1-141 | 2-108 | 1500 | 22 |

[0472] The IgG pairings were also tested in a standard Receptor Binding Assay (RBA). Table 54 summarises the activity of the lead IgG pairs in the RBA. Only the lead pairings were tested in this assay and all pairings tested exceeded the above neutralisation criteria of 900 pM.

TABLE 54
Summary of the activity of IgG pairs in the Receptor Binding Assay.
Receptor Binding Assay

| ABT1 clone | MRC5 IL-1β | ABT2 clone | MRC5 IL-1α |
|---|---|---|---|
| 1-95-15 | 540 pM | 2-108-538X | 71 pM |
| 1-95-A2 | 67 pM | 2-65-166 | 73 pM |
| 1-95-A3 | 83 pM | 2-65-166 | 709 pM |
| 1-95-A6 | 108 pM | 2-65-166 | 537 pM |

### Example 6.2

### Comparison of dAb Monomers and IgG Pairs

[0473] Pairing ABT1-95-A2 with ABT2-65-166
The ND₅₀ values determined from the MRC5 IL-1α and IL-1β neutralisation assay data from 24 are summarised in Table 55, as well as FIG. 20.

TABLE 55
ND₅₀ values for the dAb and IgG molecules.

| Clone Name | ND₅₀ IL-1α | ND₅₀ IL-1β |
|---|---|---|
| dAb ABT1-95-A2 | 133 pM | — |
| dAb ABT2-65-166 | — | 4 nM |
| IgG | 80 pM | 121 pM |

Pairing ABT1-95-A3 with ABT2-65-166
The ND₅₀ values determined from the MRC5 IL-1α and IL-1β neutralisation assay data is summarised in Table 56.

TABLE 56
ND₅₀ values for the dAb and IgG molecules.

| Clone Name | ND₅₀ IL-1α | ND₅₀ IL-1β |
|---|---|---|
| dAb ABT1-95-A3 | 11 pM | — |
| dAb ABT2-65-166 | — | 4 nM |
| IgG | 17 pM | 150 pM |

Pairing ABT1-95-A5 with ABT2-65-166
The ND₅₀ values determined from the MRC5 IL-1α and IL-1β neutralisation assay data is summarised in Table 57.

TABLE 57
ND₅₀ values for the dAb and IgG molecules.

| Clone Name | ND₅₀ IL-1α | ND₅₀ IL-1β |
|---|---|---|
| dAb ABT1-95-A5 | 16 pM | — |
| dAb ABT2-65-166 | — | 4 nM |
| IgG | 14 pM | 197 pM |

Pairing ABT1-95-A3 with ABT2-108-538X
The ND₅₀ values determined from the MRC5 IL-1α and IL-1β neutralisation assay data are summarised in Table 58.

TABLE 58
ND₅₀ values for the dAb and IgG molecules.

| Clone Name | ND₅₀ IL-1α | ND₅₀ IL-1β |
|---|---|---|
| dAb ABT1-95-A3 | 11 pM | — |
| dAb ABT2-108-538X | — | 10 nM |
| IgG* | 32 pM | 23 pM |

*There was significant precipitation in this IgG sample.

### Example 7

### Potency of Dual Specific IgG in MRC-5 Neutralization Assay

[0474] The potency of a dual specific IgG, i.e., ABT2-108-620x/ABT1-95-A3, was determined using the MRC-5 neutralization assay.

### MRC5 Assay

[0475] The following provides how the MRC5 neutralization assays described herein were performed. The MRC5 neutralization assay is based on the amount of IL-8 in the supernatant of human lung fibroblast cells having activated IL-1 receptor. First, antibody is pre-incubated with IL-1α or IL-1β. Following the incubation, the antibody (bound to IL-1α or IL-1β is added to human lung fibroblast cells, which are trypsinized and plated in a 96 well plate. The plate is then incubated for about 20 hours at 37° C. with 5% CO₂. Following the incubation, supernatant from the cells is taken and the IL-8 level is measured using standard ELISA. The binding of IL-1α or IL-1β to IL-1 receptor on cells produces IL-8.

### Results

[0476] With respect to IL-1α, the results of the MRC-5 neutralization assay showed that the potency (IC50) of ABT2-108-620x/ABT1-95-A3 was better than 1 pM antibody concentration (versus an EC50 of 0.1447 for control MAD200). For IL-1β, the results also showed that the dual specific IgG was able to inhibit IL-8 production, where ABT2-108-620x/ABT1-95-A3 had an IC50 value of 0.005585 nM and the control antibody (MAB201) had an IC50 value of 0.003586.

### Example 8

### Biacore Analysis of ABT2-108-620x/ABT1-95-A3

[0477] Biacore analysis was performed on ABT2-108-620x/ABT1-95-A3 to determine the binding affinity of the dual specific antibody. This analysis was done according to the following:

### Simultaneous and Non Interferring Independent Binding

[0478] The antibody (1-5 ug/ml) was first captured on a goat anti human IgG FC surface. Then individual binding of the antigens at 100 nM for recombinant human IL-1 alpha (rhIL-1 alpha) and 200 nM for recombinant human IL-1 beta (rhIL-1 beta) was determined. rhIL-1 alpha (100 nM) was injected followed by rhIL-1 beta(200 nM). The analysis of this injection showed that the stoichiometry for rhIL-1 alpha was 2 and for rhIL-1 beta was 0.9 (see FIG. 22). In the next cycle, rhIL-1 beta (200 nM) was injected first followed by rhIL-1 alpha, and, in this case, the stoichiometry for the antigens remained the same as before.

[0479] The analysis showed that the antibody has a higher affinity for rhIL-1 alpha than rhIL-1 beta. The difference in affinity is in the off rate. In addition, the stoichiometry was different for these two analyte. Simultaneous binding of rhIL-1 alpha followed by rhIL-1 beta to the dual specific antibody showed non interfering independent binding (see FIG. 22). The reverse was also found, i.e., simultaneous binding of rhIL-1 beta followed by rhIL-1 alpha to ABT2-108-620x/ABT1-95-A3 showed non interfering independent binding (stoichiometry rhIL-1 alpha 2.0 and stoichiometry rhIL-1 beta 0.98).

### Kinetic Analysis

[0480] Following the above, the kinetic analysis was preformed individually for rhIL-1 alpha and rhIL-1 beta. In case on rhIL-1 alpha the concentrations used were between 100-0.78 nM and for rhIL-1 beta the concentration range used was between 200-1.56 nM. Various concentrations of rhIL-1 alpha or rhIL-1 beta were injected over the captured antibody (1-5 ug/ml) using goat anti hu IgG FC capture. The surface was regenerated using 10 mM Glycine pH 1.5.

[0481] Results from the kinetic assay (bound IL-1 alpha or IL-1 beta to captured antibody) are provided in Table 59.

TABLE 59
Summary of Kinetic rate parameters by Biacore analysis:
Captured antibody: ABT2-108-620x/ABT1-95-A3

| | rhIL-1 alpha | rhIL-1 beta |
|---|---|---|
| On Rate - ka | Expt 1: 4.79 × 10⁵ | Expt 1: 3.15 × 10⁵ |
| (1/Ms) | Expt 2: 4.92 × 10⁵ | Expt 2: 2.83 × 10⁵ |
| | Average: 4.855 × 10⁵ | Average: 2.99 × 10⁵ |
| Off Rate - kd | Expt 1: 4.25 × 10⁻⁵ | Expt 1: 1.38 × 10⁻⁴ |
| (1/s) | Expt 2: 4.11 × 10⁻⁵ | Expt 2: 1.02 × 10⁻⁴ |
| | Average: 4.18 × 10⁻⁵ | Average: 1.2 × 10⁻⁴ |
| KD (pM) | Expt 1: 88.7 | Expt 1: 446 |
| | Expt 2: 83.5 | Expt 2: 361 |
| | Average: 86.1 | Average: 403.5 |

Thus, the binding to a first antigen does not interfere with the binding to a second antigen.

### Example 9

### In Vivo Inhibition of IL-1α or IL-1β Using Dual Specific IgG

[0482] The following example provides an in vivo experiment using the dual specific antibody, ABT2-108-620x/ABT1-95-A3, to inhibit IL-1α or IL-1β.

[0483] At days 7, 4, or 1 prior to cytokine challenge, C57B1/6N mice at 8 weeks of age were dosed with 200 μl of ABT2-108-620x/ABT1-95-A3 via intra-peritoneal injection (200 μg for IL-1α challenged animals and 50 μg for IL-1β challenged animals).

[0484] Animals were then challenged with 40 ng of rhIL-1α cytokine (Roche) or 60 ng of rhIL-1β cytokine (R&D Systems) in 100 μl by subcutaneous injection in the scruff of the neck. At 2 hours post cytokine challenge, animals were euthanized and terminally bled via cardiac puncture for plasma.

[0485] As shown in FIG. 23, treatment of animals with 50 μg of the anti-IL-1α/β, antibody ABT2-108-620x/ABT1-95-A3 significantly inhibited IL-6 production in response to rhIL-1β up to 7 days prior to challenge. IL-6 production in response to rhIL-1α was significantly inhibited by treatment with 200 μg of antibody 1 day prior to challenge, but not 4 or 7 days prior to challenge.

[0486] The following Tables (Tables 60 to 64) relate to the above examples.

TABLE 60
Domain Antibody Sequences

| Seq ID | VH | Sequences |
|---|---|---|
| 53 | VH Dummy | evqllesggglvqpggslrlscaasgftfs [symbol] wvrqapgkglewv |
| | | s [symbol] rftisrdnskntlylqmnslraedtavyyc |
| | | ak [symbol] wgqgtlvtvss |
| | VH to IL-1alpha | |
| 54 | ABT1-207 | evqllesgggliqpggslrlscaasgftfgryymswvrqapgkglewv |
| | | ssidylgtntyyadsvkgrftisrdnskntlylqmnslraedtavyyc |
| | | akltrirppnfdywgqgtlvtvss |
| 55 | ABT1-6 | evqllesggglvqpggslrlscaasgftfgaydmqwvrqapgkglewv |
| | | ssinksgaltsyadsvkgrftisrdnskntlylqmnslraedtavyyc |
| | | akgwasfdywgqgtlvtvss |
| 56 | ABT1-6-15 | evqllesggglvqpggslrlscaasgftfvrydmawvrqapgkglewv |
| | | ssinksgaltsyadsvkgrftisrdnskntlylqmnslraedtavyyc |
| | | akgwasfdywgqgtlvtvss |
| 4 | ABT1-6-23 | evqllesggglvqpggslrlscaasgftfvrydmawvrqapgkglewv |
| | | ssiyksgaltsyadsvkgrftisrdnskntlylqmnslraedtavyyc |
| | | akgwasfdywgqgtlvtvss |
| 57 | ABT1-6-3 | evqllesggglvqpggslrlscaasgftfgaydmqwvrqapgkglewv |
| | | ssiyksgaltsyadsvkgrftisrdnskntlylqmnslraedtavyyc |
| | | akgwasfdywgqgtlvtvss |
| 8 | ABT1-86 | evqllesggglvqpggslrlscaasgftfdryimawvrqapgkglewv |
| | | ssitpsgaatyyadsvkgrftisrdnskntlylqmnslraedtavyyc |
| | | aeepadrystwtfdywgqgtlvtvss |
| 16 | ABT1-96 | evqllesggglvqpggslrlscaasgftfnqynmfwvrqapgkglewv |
| | | svisgsgrftyyadsvkgrftisrdnskntlylqmnslraedtavyyc |
| | | akgwwrrdppfdywgqgtlvtvss |
| 20 | ABT1-98 | evqllesggglvqpggslrlscaasgftfdgyimswvrqapgkglewv |
| | | stisplgsvtyyadsvkgrftisrdnskntlylqmnslraedtavyyc |
| | | akkgpwfdywgqgtlvtvss |
| | VH to IL-1beta | |
| 58 | ABT2-10 | evqllesggglvqpggslrlsctasgftfnrynmawarqapgkglewv |
| | | seidlkgsqtyyadsvkgrftisrdnskntlylqmnslraedtavyyc |
| | | akvsisayhmfdywgqgtlvtvss |
| 52 | ABT2-108 | evqllesggglvqpggslrlscaasgftfaeytmmwvrqapgkglewv |
| | | srigqdgkntyyadsvkgrftisrdnskntlylqmnslraedtavyyc |
| | | akytgrvgvhhlfdywgqgtlvtvss |
| 59 | ABT2-108-504 | evqllesggglvqpggslrlscaasgftfadegmmwvrqapgkglewv |
| | | srigqdgkntyyadsvkgrftisrdnskntlylqmnslraedtavyyc |
| | | akytgrvgvhhlfdywgqgtlvtvss |
| 60 | ABT2-108-509 | evqllesggglvqpggslrlscaasgftfaeytmmwvrqapgkglewv |
| | | sritysgkntyyadsvkgrftisrdnskntlylqmnslraedtavyyc |
| | | akytgrvgvhhlfdywgqgtlvtvss |
| 61 | ABT2-108-511 | evqllesggglvqpggslrlscaasgftfaeytmmwvrqapgkglewv |
| | | srigqdgkntvirdsvkgrftisrdnskntlylqmnslraedtavyyc |
| | | akytgrvgvhhlfdywgqgtlvtvss |
| 62 | ABT2-108- | evqllesggglvqpggslrlscaasgftfaeytmmwvrqapgkglewv |
| | 512 (=611) | srigqdgkntyvlrsvkgrftisrdnskntlylqmnslraedtavyyc |
| | | akytgrvgvhhlfdywgqgtlvtvss |
| 63 | ABT2-108-518 | evqllesggglvqpggslrlscaasgftfaeytmmwvrqapgkglewv |
| | | srigqdgkntyyrmdvkgrftisrdnskntlylqmnslraedtavyyc |
| | | akytgrvgvhhlfdywgqgtlvtvss |
| 64 | ABT2-108-521 | evqllesggglvqpggslrlscaasgftfaeytmmwvrqapgkglewv |
| | | srigqdgkntyyadsvkgrftisrdnskntlylqmnslraedtavyyc |
| | | akytgrilghhlfdywgqgtlvtvss |
| 65 | ABT2-108-524 | evqllesggglvqpggslrlscaasgftfaeytmmwvrqapgkglewv |
| | | srigqdgkntyyadsvkgrftisrdnskntlylqmnslraedtavyyc |
| | | akytgrvfnhhlfdywgqgtlvtvss |
| 66 | ABT2-108-527 | evqllesggglvqpggslrlscaasgftfaeytmmwvrqapgkglewv |
| | | srigqdgkntyyadsvkgrftisrdnskntlylqmnslraedtavyyc |
| | | akytgrvfkhhlfdywgqgtlvtvss |
| 67 | ABT2-108-533x | evqllesggglvqpggslrlscaasgftfadegmmwvrqapgkglewv |
| | | srigqdgkntyyadsvkgrftisrdnskntlylqmnslraedtavyyc |
| | | akytgrilghhlfdywgqgtlvtvss |
| 68 | ABT2-108-534x | evqllesggglvqpggslrlscaasgftfadegmmwvrqapgkglewv |
| | | sritysgkntyyadsvkgrftisrdnskntlylqmnslraedtavyyc |
| | | akytgrifshhlfdywgqgtlvtvss |
| 69 | ABT2-108-537x | evqllesggglvqpggslrlscaasgftfadegmmwvrqapgkglewv |
| | | srigqdgkntyyrmdvkgrftisrdnskntlylqmnslraedtavyyc |
| | | akytgrilghhlfdywgqgtlvtvss |
| 70 | ABT2-108-538x | evqllesggglvqpggslrlscaasgftfadegmmwvrqapgkglewv |
| | | sritysgkntyyadsvkgrftisrdnskntlylqmnslraedtavyyc |
| | | akytgrilghhlfdywgqgtlvtvss |
| 71 | ABT2-108-601 | evqllesggglvqpggslrlscaasgftfaeeswmwvrqapgkglewv |
| | | srigqdgkntyyadsvkgrftisrdnskntlylqmnslraedtavyyc |
| | | akytgrvgvhhlfdywgqgtlvtvss |
| 72 | ABT2-108-602 | evqllesggglvqpggslrlscaasgftfaeekymwvrqapgkglewv |
| | | srigqdgkntyyadsvkgrftisrdnskntlylqmnslraedtavyyc |
| | | akytgrvgvhhlfdywgqgtlvtvss |
| 73 | ABT2-108-603 | evqllesggglvqpggslrlscaasgftfaeytmmwvrqapgkglewv |
| | | sritdagkntyyadsvkgrftisrdnskntlylqmnslraedtavyyc |
| | | akytgrvgvhhlfdywgqgtlvtvss |
| 74 | ABT2-108-604 | evqllesggglvqpggslrlscaasgftfaeytmmwvrqapgkglewv |
| | | srvtydgkntyyadsvkqrftisrdnskntlylqmnslraedtavyyc |
| | | akytgrvgvhhlfdywgqgtlvtvss |
| 75 | ABT2-108-605 | evqllesggglvqpggslrlscaasgftfaeytmmwvrqapgkglewv |
| | | srigqdgkntyyredvkgrftisrdnskntlylqmnslraedtavyyc |
| | | akytgrvgvhhlfdywgqgtlvtvss |
| 76 | ABT2-108-606 | evqllesggglvqpggslrlscaasgftfaeytmmwvrqapgkglewv |
| | | srigqdgkntyyrssvkgrftisrdnskntlylqmnslraedtavyyc |
| | | akytgrvgvhhlfdywgqgtlvtvss |
| 77 | ABT2-108-607 | evqllesggglvqpggslrlscaasgftfaeytmmwvrqapgkglewv |
| | | srigqdgkntyyrsdvkgrftisrdnskntlylqmnslraedtavyyc |
| | | akytgrvgvhhlfdywgqgtlvtvss |
| 78 | ABT2-108-612 | evqllesggglvqpggslrlscaasgftfaeytmmwvrqapgkglewv |
| | | srigqdgkntyyadsvkgrftisrdnskntlylqmnslraedtavyyc |
| | | akytgrimghhlfdywgqgtlvtvss |
| 79 | ABT2-108-613 | evqllesggglvqpggslrlscaasgftfaeytmmwvrqapgkglewv |
| | | srigqdgkntyyadsvkgrftisrdnskntlylqmnslraedtavyyc |
| | | akytgrvfehhlfdywgqgtlvtvss |
| 80 | ABT2-108-617 | evqllesggglvqpggslrlscaasgftfaeytmmwvrqapgkglewv |
| | | srigqdgkntyyadsvkgrftisrdnskntlylqmnslraedtavyyc |
| | | akytgrifthhlfdywgqgtlvtvss |
| 81 | ABT2-108-620S | evqllesggglvqpggslrlscaasgftfseeswmwvrqapgkglewv |
| | | srigqdgkntyyredvkgrftisrdnskntlylqmnslraedtavyyc |
| | | akytgrimghhlfdywgqgtlvtvss |
| 82 | ABT2-108-620x | evqllesggglvqpggslrlscaasgftfaeeswmwvrqapgkglewv |
| | | srigqdgkntyyredvkgrftisrdnskntlylqmnslraedtavyyc |
| | | akytgrimghhlfdywgqgtlvtvss |
| 32 | ABT2-13 | evqllesggglvqpggslrlscaasgftfrdyvmywarqapgkglewv |
| | | sridpmgsstyyadsvkgrftisrdnskntlylqmnslraedtavyyc |
| | | akpegnfdywgqgtlvtvss |
| 44 | ABT2-65 | evqllesggglvqpggslrlscaasgftfedyqmgwvrqapgkglewv |
| | | ssisamgnrtyyadsvkgrftisrddskntlylqmnslraedtavyyc |
| | | aknlvrtqskmwmfdywgqgtlvtvss |
| 83 | ABT2-65-166 | evqllesggglvqpggslrlscaasgftfedyqmgwvrqapgkglewv |
| | | ssisamggrtyyadsvkgrftisrdnskntlylqmnslraedtavyyc |
| | | aqnlvrlgrsrwmfdywgqgtlvtvss |
| 84 | ABT2-65-166S | evqllesggglvqpggslrlscaasgftfsdyqmgwvrqapgkglewv |
| | | ssisamggrtyyadsvkgrftisrdnskntlylqmnslraedtavyyc |
| | | aqnlvrlgrsrwmfdywgqgtlvtvss |
| 85 | ABT2-65-166SK | evqllesggglvqpggslrlscaasgftfsdyqmgwvrqapgkglewv |
| | | ssisamggrtyyadsvkgrftisrdnskntlylqmnslraedtavyyc |
| | | aknlvrlgrsrwmfdywgqgtlvtvss |
| 86 | ABT2-65-17 | evqllesggglvqpggslrlscvasgftfedyqmgwvrqapgkglewv |
| | | ssisamgnrtyyadsvkgrftisrddskntlylqmnslraedtavyyc |
| | | aqnlvrlgrsrwmfdywgqgtlvtvss |
| 87 | ABT2-65-201 | evqllesggglvqpggslrlscvasgftfedyqmgwvrqapgkglewv |
| | | ssisamgrrtyyadsvkgrftisrdnskntlylqmnslraedtavyyc |
| | | aqnlvrlgrsrwmfdywgqgtlvtvss |
| 88 | ABT2-65-203 | evqllesggglvqpggslrlscvasgftfedyqmgwvrqapgkglewv |
| | | ssisamgfrtyyadsvkgrftisrdnskntlylqmnslraedtavyyc |
| | | aqnlvrlgrsrwmfdywgqgtlvtvss |
| 89 | ABT2-65-8 | evqllesggglvqpggslrlscaasgftfedyqmgwvrqapgkglewv |
| | | ssisamgnrtyyadsvkgrftisrddskntlylqmnslraedtavyyc |
| | | aqnlvrmdsrrwmfdywgqgtlvtvss |
| 90 | ABT2-65-B1 | evqllesggglvqpggslrlscvasgftfedyqmgwvrqapgkglewv |
| | | ssisamggrtyyadsvkgrftisrddskntlylqmnslraedtavyyc |
| | | aqnlvrlgrsrwmfdywgqgtlvtvss |
| 91 | ABT2-65-B2 | evqllesggglvqpggslrlscvasgftfedyqmgwvrqapgkglewv |
| | | ssisamgrrtyyadsvkgrftisrddskntlylqmnslraedtavyyc |
| | | aqnlvrlgrsrwmfdywgqgtlvtvss |
| 92 | ABT2-65-B3 | evqllesggglvqpggslrlscvasgftfedyqmgwvrqapgkglewv |
| | | ssisamgnrayyadsvkgrftisrddskntlylqmnslraedtavyyc |
| | | aqnlvrlgrsrwmfdywgqgtlvtvss |
| Seq ID | VL | Sequences |
| 93 | Vk Dummy | diqmtqspsslsasvgdrvtitc [symbol] wyqqkpgkapkll |
| | | iy [symbol] gvpsrfsgsgsgtdftltisslqpedfatyyc [symbol] |
| | | [symbol] fgqgtkveikr |
| | VL to IL-1alpha | |
| 24 | ABT1-122 | diqmtqspsslsasvgdrvtitcrasqpiwtelnwyqqkpgkapkll |
| | | iygssslqsgvpsrfsgsgsgtdftltisslqpedfatyycqqfayf |
| | | patfgqgtkveikr |
| 94 | ABT1-122-505 | diqmtqspsslsasvgdrvtitcrasqpiwtelnwyqqkpgkapkll |
| | | iygssslqsgvpsrfsgsgsgtdftltisslqpedfatyyckqfayf |
| | | patfgqgtkveikr |
| 95 | ABT1-122-508 | diqmtqspsslsasvgdrvtitcrasqpiwtelnwyqqkpgkapkll |
| | | iygssslqrgvpsrfsgsgsgtdftltisslqpedfatyycqqfayf |
| | | patfgqgtkveikr |
| 96 | ABT1-122-510 | diqmtqspsslsasvgdrvtitcrfsypiwtelnwyqqkpgkapkll |
| | | iygssslqsgvpsrfsgsgsgtdftltisslqpedfatyycqqfayf |
| | | patfgqgtkveikr |
| 97 | ABT1-122-511 | diqmtqspsslsasvgdrvtitcrasqpiwtelnwyqqkpgkapkll |
| | | iygssslqrgvpsrfsgsgsgtdftltisslqpedfatyyckqfayf |
| | | patfgqgtkveikr |
| 98 | ABT1-122-512 | diqmtqspsslsasvgdrvtitcrasqpiwtelnwyqqkpgkapkll |
| | | iygsakrqrgvpsrfsgsgsgtdftltisslqpedfatyyckqfayf |
| | | patfgqgtkveikr |
| 99 | ABT1-122-513 | diqmtqspsslsasvgdrvtitcrasqpiwtelnwyqqkpgkapkll |
| | | iygsgsrqrgvpsrfsgsgsgtdftltisslqpedfatyyckqfayf |
| | | patfgqgtkveikr |
| 100 | ABT1-122-551 | diqmtqspsslsasvgdrvtitcrakfniwtelnwyqqkpgktpkll |
| | | iygssslqsgvpsrfsgsgsgtdftltisslqpedfatyycqqfayf |
| | | patfgqgtkveikr |
| 101 | ABT1-122-552 | diqmtqspsslsasvgdrvtitcraslgvwtelnwyqqkpgkapkll |
| | | iygssslqsgvpsrfsgsgsgtdftltisslqpedfatyycqqfayf |
| | | patfgqgtkveikr |
| 102 | ABT1-122-553 | diqmtqspsslsasvgdrvtitcrasqpiwtelkwyqqkpgkapkll |
| | | iygssslqsgvpsrfsgsgsgtdftltisslqpedfatyycqqfayf |
| | | patfgqgtkveikr |
| 103 | ABT1-122-554 | diqmtqspsslsasvgdrvtitcrasqpiwtelnwyqqkpgkapkll |
| | | iygssslqsgvpsrfsgsgsgtdftltisslqpedfatyycqqfayf |
| | | patfgqetkveikr |
| 104 | ABT1-122-555 | diqmtqspsslsasvgdrvtitcrasqpiwtelnwyqqkpgktpkll |
| | | iygssslqsgvpsrfsgsgsgtdftltisslqpedfatyycqqfayf |
| | | patfgqgtkveikr |
| 105 | ABT1-122-556 | diqmtqspsslsasvgdrvtitcrasqpiwtelnwyqqkpgkapkll |
| | | iygssslqsgvpsrfsgsgsgtdftltisslqpedfatyhcqqfayf |
| | | patfgqgtkveikr |
| 106 | ABT1-122-557 | diqmtqspsslsasvgdrvtitcrasqpiwtelnwyqqkpgkapkll |
| | | iygssslqsgvpsrfsgsgsgtdftltisslqpedfatyycqqfayf |
| | | patlgqgtkveikr |
| 107 | ABT1-122-750M | diqmtqspsslsasvgdrvtitcsasqhiwtemswyqqkpgkapkll |
| | | iygsasrqkgvpsrfsgsgsgtdftltisslqpedfatyyckqfayf |
| | | pntfgqgtkveikr |
| 108 | ABT1-122-750MH | diqmtqspsslsasvgdrvtitcsasqhiwtemswyqqkpgkapkll |
| | | iygsasrqkgvpsrfsgsgsgtdftltisslqpedfatyhckqfayf |
| | | pntfgqgtkveikr |
| 109 | ABT1-122-750MT | diqmtqspsslsasvgdrvtitcsasqhiwtemswyqqkpgktpkll |
| | | iygsasrqkgvpsrfsgsgsgtdftltisslqpedfatyyckqfayf |
| | | pntfgqgtkveikr |
| 110 | ABT1-122-750T | diqmtqspsslsasvgdrvtitcsasqhiwteiswyqqkpgkapkll |
| | | iygsasrqkgvpsrfsgsgsgtdftltisslqpedfatyyckqfayf |
| | | pntfgqgtkveikr |
| 111 | ABT1-122-750x | diqmtqspsslsasvgdrvaitcsasqhiwteiswyqqkpgkapkll |
| | | iygsasrqkgvpsrfsgsgsgtdftltisslqpedfatyyckqfayf |
| | | pntfgqgtkveikr |
| 112 | ABT1-122-750xH | diqmtqspsslsasvgdrvaitcsasqhiwteiswyqqkpgkapkll |
| | | iygsasrqkgvpsrfsgsgsgtdftltisslqpedfatyhckqfayf |
| | | pntfgqgtkveikr |
| 28 | ABT1-141 | diqmtqspsslsasvgdrvtitcrasqwiqkqlawyqqkpgkapkll |
| | | iysssylqsgvpsrfsgsgsgtdftltisslqpedfatyycqqhlrv |
| | | pftfgqgtkveikr |
| 113 | ABT1-141-25 | diqmtqspsslsasvgdrvtitcrasqwiqkqlawyqqkpgkapkll |
| | | iysssylqsgvpsrfsgsgsgtdftltisslqpedfatyycqqhlrv |
| | | pmtfgqgtkveikr |
| 114 | ABT1-141-29 | diqvtqspsslsasvgdrvtitcrasqwiqkqlawyqlkpgkapkll |
| | | iysssylqsgvpsrfsgsgsgtdftltisslqpedfatyycqqhlrv |
| | | pftfgqgtkveikr |
| 115 | ABT1-18 | diqmtqspsslsasvgdrvtitcrasqsiqrwlawyqqkpgkapkll |
| | | iyfasqlqsgvpsrfsqsgsgtdftltisslqpedfatyycqqllrl |
| | | pktfgqgtkveikr |
| 116 | ABT1-212 | diqmtqspsslsasvgdrvtitcrasqringnlrwyqqkpgkapkll |
| | | iysvsqlqsgvpsrfsgsgsgtdftltisslqpedfatyycqqgydw |
| | | pptfgqgtkvetkr |
| 117 | ABT1-221 | diqmtqspsslsasvgdrvtitcrasqdiwpylmwyqqkpgkapkll |
| | | iyyssmlqsgvpsrfsgsgsgtdftltisslqpedfatyycqqfrrw |
| | | pytfgqgtkveikr |
| 118 | ABT1-222 | diqmtqspsslsasvgdrvtitcrasqpitrnlrwyqqkpgkapkll |
| | | iyhssvlqsgvpsrfsgsgsgtdftltisslqpedfatyycqqgyrw |
| | | pvtfgqgtkveikr |
| 119 | ABT1-3 | diqmtqspsslsasvgdrvtitcrasqsiwtelkwyqqkpgkapkll |
| | | iygasllqsgvpsrfsgsgsgtdftltisslqpedfatyycqqfayf |
| | | pftfgqgtkveikr |
| 120 | ABT1-9 | diqmtqspsslsasvgdrvtitcrasqsigssllwyqqkpgkapkll |
| | | iylasrlqsgvpsrfsgsgsgtdftltisslqpedfatyycqqfrst |
| | | pntfgqgtkveikr |
| 12 | ABT1-95 | diqmtqspsslsasvgdrvtitcrasqpihgnlrwyqqkpgkapkll |
| | | iynisnlqsgvpsrfsgsgsgtdftltisslqpedfatyycqqgyrw |
| | | pvtfgqgtkveikr |
| 121 | ABT1-95-15 | diqmtqspsslsasvgdrvtitcrasqpivrnlrwyqqkpgkapkll |
| | | iysssylepgvpsrfsgsgsgtdftltisslqpedfatyhcqqgyrw |
| | | pvtfgqgtkveikr |
| 122 | ABT-95-174 | diqmtqspsslsasvgdrvtitcrasrpivrnlrwyqqkpgkapkll |
| | | iysvsylepgvpsrfsgsgsgtdftltisslqpedfatyhcrqgyrw |
| | | pvtfgqgtkveikr |
| 123 | ABT1-95-177 | diqmtqspsslsasvgdrvtitcrasqpivrnlrwyqqkpgkapkll |
| | | iyassylepgvpsrfsgsgsgtdftltisslqpedfatyhcrqgyrw |
| | | pvtfgqgtkveikr |
| 124 | ABT1-95-181 | diqmtqspsslsasvgdrvtitcraskpivrnmrwyqqkpgkapkll |
| | | iysvsylepgvpsrfsgsgsgtdftltisslqpedfatyhclqgyrw |
| | | pptfgqgtkveikr |
| 125 | ABT1-95-182 | diqmtqspsslsasvgdrvtitcraskpgvrnlrwyqqkpgkapkll |
| | | iysvsylepgvpsrfsgsgsgtdftltisslqpedfatyhclqgyrw |
| | | pptfgqgtkveikr |
| 126 | ABT1-95-184 | diqmtqspsslsasvgdrvtitcrasrtpvrnlrwyqqkpgkapkll |
| | | iysrsylepgvpsrfsgsgsgtdftltisslqpedfatyhclqgyrw |
| | | pptfgqgtkveikr |
| 127 | ABT1-95-3 | diqmtqspsslsasvgdrvtitcrasqpihgnlrwyqqkpgkapkll |
| | | iysssylqsgvpsrfsgsgsgtdftltisslqpedfatyhcqqgyrw |
| | | pvtfgqgtkveikr |
| 128 | ABT1-95-A1 | diqmtqspsslsasvgdrvtitcrasrpgvrnlrwyqqkpgkapkll |
| | | iyhvsdlepgvpsrfsgsgsgtdftltisslqpedfatyhcrqgyvw |
| | | pvpfdqgtkveikr |
| 129 | ABT1-95-A2 | diqmtqspsslsasvgdrvtitcrilqppgrnlrwyqqkpgkapkll |
| | | iysksflepgvpsrfsgsgsgtdftltisslqpedfatyhcqqgyrw |
| | | pvtfgqgtkveikr |
| 130 | ABT1-95-A3 | diqmtqspsslsasvgdrvtitcraskpgvrnmrwyqqkpgkapkll |
| | | iysvsylepgvpsrfsgsgsgtdftltisslqpedfatyhclqgyrw |
| | | pptfgqgtkveikr |
| 131 | ABT1-95-A4 | diqmtqspsslsasvgdrvtitcrasrpgvrnlrwyqqkpgkapkll |
| | | iysrsflepgvpsrfsgsgsgtdftltisslqpedfatyhclqgyrw |
| | | pptfgqgtkveikr |
| 132 | ABT1-95-A5 | diqmtqspsslsasvgdrvtitcrasrtpvrnlrwyqqkpgkapkll |
| | | iysrsflepgvpsrfsgsgsgtdftltisslqpedfatyhclqgyrw |
| | | pptfgqgtkveikr |
| 133 | ABT1-95-A6 | diqmtqspsslsasvgdrvtitcraskpgvrnmrwyqqkpgkapkll |
| | | iyaksylepgvpsrfsgsgsgtdftltisslqpedfatyhckqgyrw |
| | | pvqfgqgtkveikr |
| | VL to IL-1beta | |
| 36 | ABT2-42 | diqmtqspsslsasvgdrvtitcrasqyiekwltwyqqkpgkaptll |
| | | iyrgsllqsgvpsrfsgsgsgtdftltisslqpedfatyycqqteyw |
| | | pftfgqgtkveikr |
| 40 | ABT2-46 | diqmtqspsslsasvgdrvtitcrasqsiiewlswyqqkpgkapkll |
| | | iyrtsvlqsgvpsrfsgsgsgtdftltisslqpedfatyycqqnefw |
| | | pftfgqgtkveikr |
| 48 | ABT2-76 | diqmtqspsslsasvgdrvtitcrasqsidrwlawyqqkpgkapkll |
| | | iyrgsilqsgvpsrfsgsgsgtdftltisslqpedfatyycqqvafw |
| | | pptfgqgtkveikr |

TABLE 61
Summary of identified single domain antibodies

| IL1α Clone | | | | | | | |
|---|---|---|---|---|---|---|---|
| Name | | | | MRC5 | | | AMINO ACID SEQUENCE |
| (Clone type) | CDR1 | CDR2 | CDR3 | ND₅₀ | | K_{D} (M) | (diversified residues are indicated in bold; CDRs are underlined) |
| ABT1-6-23 | VRYDMA | SIYKSGALTSYDS | GWASFDY | 0.03 | μM | 6.1 × 10⁻⁸ | EVQLLESGGGLVQPGGSLRLSCAASGFTFVRYDMAWVRQAPGKGLEWVS |
| (VH) | (SEQ ID NO: 1) | VKG | (SEQ ID | | | | SIYKSGALTSYDSVKGRFTISRDNSKNTLYLQMNSLRAEDTAVYYCAKG |
| | | (SEQ ID NO: 2) | NO: 3) | | | | WASFDYWGQGTLVTVSS (SEQ ID NO: 4) |
| ABT1-86 | RYIMA | SITPSGAATYYAD | EPADRYSTW | 900 | nM | 1.1 × 10⁻⁷ | EVQLLESGGGLVQPGGSLRLSCAASGFTFDRYIMAWVRQAPGKGLEWVS |
| (VH) | (SEQ ID NO: 5) | SVKG | TFDY | | | | SITPSGAATYYADSVKGRFTISRDNSKNTLYLQMNSLRAEDTAVYYCAE |
| | | (SEQ ID NO: 6) | (SEQ ID | | | | EPADRYSTWTFDYWGQGTLVTVSS (SEQ ID NO: 8) |
| | | | NO: 7) | | | | |
| ABT1-95 | RASQPIHGNLR | NISNLQS | QQGYRWPVT | 800 | nM | 4.5 × 10⁻⁸ | DIQMTQSPSSLSASVGDRVTITCRASQPIHGNLRWYQQKPGKAPKLLIY |
| (VK) | (SEQ ID NO: 9) | (SEQ ID | (SEQ ID | | | | NISNLQSGVPSRFSGSGSGTDFTLTISSLQPEDFATYYCQQGYRWPVTF |
| | | NO: 10) | NO: 11) | | | | GQGTKVEIKR (SEQ ID NO: 12) |
| ABT1-96 | QYNMF | VISGSGRFTYADS | GWWRRDPPF | 11 | nM | 1.1 × 10⁻⁹ | EVQLLESGGGLVQPGGSLRLSCAASGFTFNQYNMFWVRQAPGKGLEWVS |
| (VH) | (SEQ ID | VKG | DY | | | | VISGSGRFTYADSVKGRFTISRDNSKNTLYLQMNSLRAEDTAVYYCAKG |
| | NO: 13) | (SEQ ID | (SEQ ID | | | | WWRRDPPFDYWGQGTLVTVSS (SEQ ID NO: 16) |
| | | NO: 14) | NO: 15) | | | | |
| ABT1-98 | GYIMS | TISPLGSVTYYAD | KGPWFDY | 30 | nM | 1.3 × 10⁻⁸ | EVQLLESGGGLVQPGGSLRLSCAASGFTFDGYIMSWVRQAPGKGLEWVS |
| (VH) | (SEQ ID | SVKG | (SEQ ID | | | | TISPLGSVTYYADSVKGRFTISRDNSKNTLYLQMNSLRAEDTAVYYCAK |
| | NO: 17) | (SEQ ID | NO: 19) | | | | KGPWFDYWGQGTLVTVSS (SEQ ID NO: 20) |
| | | NO: 18) | | | | | |
| ABT1-122 | RASQPIWTELN | GSSSLQS | QQFAYFPAT | 50 | nM | 4.2 × 10⁻⁸ | DIQMTQSPSSLSASVGDRVTITCRASQPIWTELNWYQQKPGKAPKLLIY |
| (VK) | (SEQ ID | (SEQ ID | (SEQ ID | | | | GSSSLQSGVPRFSGSGSGTDFTLTISSLQPEDFATYYCQQFAYFPATFG |
| | NO: 21) | NO: 22) | NO: 23) | | | | QGTKVEIKR (SEQ ID NO: 24) |
| ABT1-141 | RASQWIQKQLA | SSSYLQS | QQHLRVPFT | 50 | nM | 3.0 × 10⁻⁷ | DIQMTQSPSSLSASVGDRVTITCRASQWIQKQLAWYQQKPGKAPKLLIY |
| (VK) | (SEQ ID | (SEQ ID | (SEQ ID | | | | SSSYLQSGVPRFSGSGSGTDFTLTISSLQPEDFATYYCQQHLRVPFTFG |
| | NO: 25) | NO: 26) | NO: 27) | | | | QGTKVEIKR (SEQ ID NO: 28) |
| IL1β Clone | | | | | | | |
| Name | | | | | | | |
| ABT2-13 | DYVMY | RIDPMGSSTYYAD | PEGNFDY | ~1000 | nM | 9.3 × 10⁻⁷ | EVQLLESGGGLVQPGGSLRLSCAASGFTFRDYVMYWARQAPGKGLEWVS |
| (VH) | (SEQ ID | SVKG | (SEQ ID | | | | RIDPMGSSTYYADSVKGRFTISRDNSKNTLYLQMNSLRAEDTAVYYCAK |
| | NO: 29) | (SEQ ID | NO: 31) | | | | PEGNFDYWGQGTLVTVSS (SEQ ID NO: 32) |
| | | NO: 30) | | | | | |
| ABT2-42 | RASQYIEKWLT | RGSLLQS | QQTEYWPFT | 770 | nM | 5.4 × 10⁻⁵ | DIQMTQSPSSLSASVGDRVTITCRASQYIEKWLTWYQQKPGKAPTLLIY |
| (VK) | (SEQ ID | (SEQ ID | (SEQ ID | | | | RGSLLQSGVPRFSGSGSGTDFTLTISSLQPEDFATYYCQQTEYWPFTFG |
| | NO: 33) | NO: 34) | NO: 35) | | | | QGTKVEIKR (SEQ ID NO: 36) |
| ABT2-46 | RASQSIIEWLS | RTSVLQS | QQNEFWPFT | 386 | nM | 2.8 × 10⁻⁶ | DIQMTQSPSSLSASVGDRVTITCRASQSIIEWLSWYQQKPGKAPKLLIY |
| (VK) | (SEQ ID | (SEQ ID | (SEQ ID | | | | RTSVLQSGVPSRFSGSGSGTDFTLTISSLQPEDFATYYCQQNEFWPPTF |
| | NO: 37) | NO: 38) | NO: 39) | | | | GQGTKVEIKR (SEQ ID NO: 40) |
| ABT2-65 | DYQMG | SISAMGNRTYYAD | NLVRTQSKM | 266 | nM | 2.8 × 10⁻⁸ | EVQLLESGGGLVQPGGSLRLSCAASGFTFEDYQMGWVRQAPGKGLEWVS |
| (VH) | (SEQ ID | SVKG | WMFDY | | | | SISAMGNRTYYADSVKGRFTISRDDSKNTLYLQMNSLRAEDTAVYYCAK |
| | NO: 41) | (SEQ ID | (SEQ ID | | | | NLVRTQSKMWMFDYWGQGTLVTVSS (SEQ ID NO: 44) |
| | | NO: 42) | NO: 43) | | | | |
| ABT2-76 | RASQSIDRWLA | RGSILQS | QQVAFWPPT | 456 | nM | 1.3 × 10⁻⁶ | DIQMTQSPSSLSASVGDRVTITCRASQSIDRWLAWYQQKPGKAPKLLIY |
| (VK) | (SEQ ID | (SEQ ID | (SEQ ID | | | | RGSILQSGVPSRFSGSGSGTDFTLTISSLQPEDFATYYCQQVAFWPPTF |
| | NO: 45) | NO: 46) | NO: 47) | | | | GQGTKVEIKR (SEQ ID NO: 48) |
| ABT2-108 | EYTMM | RIGQDGKNTYYAD | YTGRVGVHH | 200 | nM | 1.1 × 10⁻⁷ | EVQLLESGGGLVQPGGSLRLSCAASGFTFAEYTMMWVRQAPGKGLEWVS |
| (VH) | (SEQ ID | SVKG | LFDY | | | | RIGQDGKNTYYADSVKGRFTISRDNSKNTLYLQMNSLRAEDTAVYYCAK |
| | NO: 49) | (SEQ ID | (SEQ ID | | | | YTGRVGVHHLFDYWGQGTLVTSS (SEQ ID NO: 52) |
| | | NO: 50) | NO: 51) | | | | |

TABLE 62
ABT 1 dAbs

| | | IC₅₀ | ND₅₀ | K_{D} |
|---|---|---|---|---|
| Clone Name | dAb | [nM] | [nM] | [nM] |
| ABT1-3 | VK | | 1000 | |
| ABT1-6 | VH | 3000 | 3000 | |
| ABT1-6-3 | VH | 80 | 60 | |
| ABT1-6-15 | VH | 200 | 500 | |
| ABT1-6-23 | VH | 30 | 30 | 6 |
| ABT1-7 | VH | | | |
| ABT1-8 | VH | | | |
| ABT1-9 | VK | | 4000 | |
| ABT1-9-500 | VK | | | |
| ABT1-10 | VK | | >20000 | |
| ABT1-11 | VK | | >20000 | |
| ABT1-12 | VK | | | |
| ABT1-13 | VK | | | |
| ABT1-14 | VK | | | |
| ABT1-15 | VH | | | |
| ABT1-17 | VH | | | |
| ABT1-18 | VK | | >10000 | |
| ABT1-19 | VH | | | |
| ABT1-20 | VH | | 1000 | |
| ABT1-21 | VH | | | |
| ABT1-22 | VH | | 7000 | |
| ABT1-23 | VH | | 5000 | |
| ABT1-24 | VK | | | |
| ABT1-25 | VK | | | |
| ABT1-26 | VK | | | |
| ABT1-27 | VK | | | |
| ABT1-28 | VK | | | |
| ABT1-29 | VK | | | |
| ABT1-30 | VK | | | |
| ABT1-31 | VH | | | |
| ABT1-32 | VH | | | |
| ABT1-33 | VH | | | |
| ABT1-34 | VH | | | |
| ABT1-35 | VH | | | |
| ABT1-36 | VH | | | |
| ABT1-37 | VH | | | |
| ABT1-38 | VH | | | |
| ABT1-40 | VH | | | |
| ABT1-41 | VH | | | |
| ABT1-42 | VH | | | |
| ABT1-43 | VH | | | |
| ABT1-45 | VH | | | |
| ABT1-46 | VH | | | |
| ABT1-47 | VH | | 5000 | |
| ABT1-49 | VH | | | |
| ABT1-50 | VH | | | |
| ABT1-51 | VH | | | |
| ABT1-52 | VH | | | |
| ABT1-53 | VK | | | |
| ABT1-54 | VK | | | |
| ABT1-56 | VK | | | |
| ABT1-57 | VK | | | |
| ABT1-59 | VK | | | |
| ABT1-60 | VK | | | |
| ABT1-61 | VK | | | |
| ABT1-62 | VK | | | |
| ABT1-63 | VK | | | |
| ABT1-64 | VK | | | |
| ABT1-65 | VK | | | |
| ABT1-66 | VK | | | |
| ABT1-67 | VK | | 0.044 | |
| ABT1-68 | VK | | | |
| ABT1-75 | VH | | | |
| ABT1-76 | VH | | | |
| ABT1-77 | VH | | | |
| ABT1-78 | VH | | | |
| ABT1-79 | VH | | | |
| ABT1-81 | VH | | | |
| ABT1-82 | VK | | | |
| ABT1-84 | VH | >10000 | 3000 | |
| ABT1-85 | VH | >10000 | 30000 | |
| ABT1-86 | VH | 1000 | 900 | |
| ABT1-87 | VH | >10000 | >10000 | |
| ABT1-88 | VH | >10000 | >10000 | |
| ABT1-89 | VH | >10000 | >10000 | |
| ABT1-90 | VH | >10000 | >10000 | |
| ABT1-91 | VH | >10000 | >10000 | |
| ABT1-92 | VH | >10000 | >10000 | |
| ABT1-93 | VH | >10000 | 5000 | |
| ABT1-94 | VH | | | |
| ABT1-95 | VK | 500 | 800 | |
| ABT1-95-3 | VK | 4 | 80 | 7 |
| ABT1-95-4 | VK | 0.7 | 2 | 1.5 |
| ABT1-95-6 | VK | 0.8 | 1 | 2.1 |
| ABT1-95-8 | VK | 0.8 | 1 | 2.1 |
| ABT1-95-9 | VK | 0.8 | — | 1 |
| ABT1-95-10 | VK | 0.8 | — | 0.9 |
| ABT1-95-11 | VK | 0.9 | 0.300 | 1.1 |
| ABT1-95-12 | VK | 0.8 | — | 0.9 |
| ABT1-95-13 | VK | 0.3 | 0.120 | 0.9 |
| ABT1-95-14 | VK | 0.3 | 0.250 | 1.2 |
| ABT1-95-15 | VK | 0.3 | 0.045 | 0.4 |
| ABT1-95-21 | VK | 0.5 | 0.61 | |
| ABT1-95-22 | VK | 0.5 | 1 | |
| ABT1-95-23 | VK | 0.5 | 0.5 | |
| ABT1-95-24 | VK | 0.5 | 0.27 | |
| ABT1-95-25 | VK | 0.5 | 0.43 | |
| ABT1-95-26 | VK | 0.5 | 0.71 | |
| ABT1-95-27 | VK | 0.5 | 1 | |
| ABT1-95-28 | VK | >0.5 | 2 | |
| ABT1-95-29 | VK | >0.5 | 1 | |
| ABT1-95-30 | VK | >1 | >10 | |
| ABT1-95-31 | VK | >0.5 | 3.3 | |
| ABT1-95-32 | VK | >0.5 | 1.2 | |
| ABT1-95-33 | VK | 0.5 | 1 | |
| ABT1-95-34 | VK | 0.1 | 1 | |
| ABT1-95-35 | VK | 0.2 | | |
| ABT1-95-36 | VK | <0.1 | | |
| ABT1-95-37 | VK | 0.1 | | |
| ABT1-95-38 | VK | <0.1 | 0.119 | |
| ABT1-95-39 | VK | 0.2 | | |
| ABT1-95-40 | VK | | | |
| ABT1-95-41 | VK | <0.1 | 0.150 | |
| ABT1-95-42 | VK | 0.1 | | |
| ABT1-95-43 | VK | | | |
| ABT1-95-44 | VK | <0.1 | 0.150 | |
| ABT1-95-45 | VK | | | |
| ABT1-95-46 | VK | 0.8 | | |
| ABT1-95-47 | VK | 0.1 | 0.139 | |
| ABT1-95-48 | VK | | | |
| ABT1-95-49 | VK | | 274 | |
| ABT1-95-50 | VK | 0.5 | | |
| ABT1-95-51 | VK | | 615 | |
| ABT1-95-52 | VK | 1 | | |
| ABT1-95-53 | VK | 0.3 | | |
| ABT1-95-54 | VK | 1 | | |
| ABT1-95-55 | VK | 0.6 | | |
| ABT1-95-56 | VK | 0.3 | | |
| ABT1-95-57 | VK | 0.6 | | |
| ABT1-95-58 | VK | 0.6 | | |
| ABT1-95-59 | VK | 0.3 | | |
| ABT1-95-60 | VK | 0.7 | | |
| ABT1-95-61 | VK | 0.3 | | |
| ABT1-95-62 | VK | 0.1 | | |
| ABT1-95-63 | VK | 0.6 | | |
| ABT1-95-64 | VK | 3 | 0.438 | |
| ABT1-95-65 | VK | 0.2 | | |
| ABT1-95-67 | VK | 0.1 | 0.044 | |
| ABT1-95-68 | VK | 0.2 | | |
| ABT1-95-69 | VK | 1 | | |
| ABT1-95-70 | VK | 0.1 | | |
| ABT1-95-71 | VK | 1 | | |
| ABT1-95-72 | VK | 1 | | |
| ABT1-95-73 | VK | 3 | | |
| ABT1-95-74 | VK | 0.3 | | |
| ABT1-95-75 | VK | 0.3 | | |
| ABT1-95-76 | VK | 0.3 | | |
| ABT1-95-77 | VK | 0.3 | | |
| ABT1-95-78 | VK | 0.3 | | |
| ABT1-95-79 | VK | 0.3 | | |
| ABT1-95-80 | VK | 0.3 | 0.008 | |
| ABT1-95-81 | VK | 0.3 | | |
| ABT1-95-82 | VK | 0.4 | | |
| ABT1-95-83 | VK | 0.2 | | |
| ABT1-95-84 | VK | | | |
| ABT1-95-85 | VK | 0.2 | 0.713 | |
| ABT1-95-86 | VK | 0.1 | 0.2 | |
| ABT1-95-87 | VK | 0.2 | | |
| ABT1-95-88 | VK | 0.2 | 0.714 | |
| ABT1-95-89 | VK | 0.3 | | |
| ABT1-95-90 | VK | 0.5 | | |
| ABT1-95-91 | VK | 0.3 | | |
| ABT1-95-92 | VK | <0.1 | 0.5 | |
| ABT1-95-93 | VK | 0.1 | | |
| ABT1-95-94 | VK | 0.1 | | |
| ABT1-95-95 | VK | 0.3 | | |
| ABT1-95-96 | VK | 0.1 | | |
| ABT1-95-97 | VK | | | |
| ABT1-95-98 | VK | 0.8 | | |
| ABT1-95-99 | VK | | | |
| ABT1-95-100 | VK | | | |
| ABT1-95-101 | VK | 0.5 | | |
| ABT1-95-102 | VK | 0.1 | 0.184 | |
| ABT1-95-103 | VK | | | |
| ABT1-95-104 | VK | | | |
| ABT1-95-105 | VK | 0.1 | | |
| ABT1-95-106 | VK | 0.1 | | |
| ABT1-95-107 | VK | 0.1 | 0.5 | |
| ABT1-95-108 | VK | 0.5 | | |
| ABT1-95-109 | VK | | | |
| ABT1-95-110 | VK | 0.1 | | |
| ABT1-95-111 | VK | <0.1 | | |
| ABT1-95-112 | VK | 0.1 | | |
| ABT1-95-113 | VK | <0.1 | | |
| ABT1-95-114 | VK | 0.2 | | |
| ABT1-95-115 | VK | 0.2 | 0.230 | |
| ABT1-95-116 | VK | 0.2 | 0.168 | |
| ABT1-95-117 | VK | 0.2 | 0.1 | |
| ABT1-95-118 | VK | 0.2 | 0.122 | |
| ABT1-95-119 | VK | | | |
| ABT1-95-120 | VK | 0.1 | 0.1 | |
| ABT1-95-121 | VK | 0.2 | 0.1 | |
| ABT1-95-122 | VK | 0.1 | 0.116 | |
| ABT1-95-123 | VK | 0.1 | | |
| ABT1-95-124 | VK | 0.2 | | |
| ABT1-95-125 | VK | 0.2 | | |
| ABT1-95-126 | VK | 0.8 | | |
| ABT1-95-127 | VK | 0.1 | | |
| ABT1-95-128 | VK | >1 | | |
| ABT1-95-129 | VK | >10 | | |
| ABT1-95-130 | VK | >1 | | |
| ABT1-95-131 | VK | 0.1 | 0.085 | |
| ABT1-95-132 | VK | 0.1 | 2 | |
| ABT1-95-133 | VK | | 0.050 | |
| ABT1-95-134 | VK | | 0.075 | |
| ABT1-95-135 | VK | | 0.1 | |
| ABT1-95-136 | VK | | 0.1 | |
| ABT1-95-137 | VK | | 0.09 | |
| ABT1-95-139 | VK | 0.2 | 0.1 | |
| ABT1-95-140 | VK | 0.2 | | |
| ABT1-95-141 | VK | 1 | | |
| ABT1-95-142 | VK | 0.5 | | |
| ABT1-95-143 | VK | 10 | | |
| ABT1-95-144 | VK | 0.5 | | |
| ABT1-95-145 | VK | 0.8 | | |
| ABT1-95-146 | VK | 0.8 | | |
| ABT1-95-147 | VK | 0.2 | | |
| ABT1-95-148 | VK | 0.2 | 0.190 | |
| ABT1-95-149 | VK | 0.2 | 0.064 | |
| ABT1-95-150 | VK | 0.2 | | |
| ABT1-95-151 | VK | 0.2 | | |
| ABT1-95-152 | VK | 0.8 | | |
| ABT1-95-153 | VK | 0.5 | | |
| ABT1-95-154 | VK | >10 | | |
| ABT1-95-155 | VK | 10 | | |
| ABT1-95-156 | VK | 10 | | |
| ABT1-95-157 | VK | 10 | | |
| ABT1-95-158 | VK | 0.5 | | |
| ABT1-95-159 | VK | 0.1 | 0.127 | |
| ABT1-95-160 | VK | 0.1 | 0.238 | |
| ABT1-95-161 | VK | 0.1 | 0.5 | |
| ABT1-95-162 | VK | | 0.186 | |
| ABT1-95-163 | VK | | 0.05 | |
| ABT1-95-164 | VK | | 0.150 | |
| ABT1-95-165 | VK | | 0.391 | |
| ABT1-95-166 | VK | | 0.035 | |
| ABT1-95-167 | VK | | 0.469 | |
| ABT1-95-168 | VK | | 2.3 | |
| ABT1-95-169 | VK | | 0.093 | |
| ABT1-95-170 | VK | | 0.2 | |
| ABT1-95-171 | VK | | 0.059 | |
| ABT1-95-172 | VK | | 0.171 | |
| ABT1-95-173 | VK | | 0.151 | |
| ABT1-95-174 | VK | | 0.01 | |
| ABT1-95-175 | VK | | 0.017 | |
| ABT1-95-176 | VK | | 0.027 | |
| ABT1-95-177 | VK | | 0.008 | |
| ABT1-95-178 | VK | | 0.004 | |
| ABT1-95-179 | VK | | 0.022 | |
| ABT1-95-181 | VK | | 0.014 | |
| ABT1-95-182 | VK | | 0.005 | |
| ABT1-95-183 | VK | | | |
| ABT1-95-184 | VK | | 0.006 | |
| ABT1-95-500 | VK | | | |
| ABT1-95-501 | VK | | | |
| ABT1-95-502 | VK | | | |
| ABT1-95-503 | VK | | | |
| ABT1-95-A1 | VK | | | |
| ABT1-95-A2 | VK | | 0.133 | |
| ABT1-95-A3 | VK | | 0.011 | |
| ABT1-95-A5 | VK | | 0.016 | |
| ABT1-95-A6 | VK | | 0.024 | |
| ABT1-96 | VH | | 17 | |
| ABT1-97 | VH | | 3000 | |
| ABT1-98 | VH | | <100 | |
| ABT1-99 | VH | | 500 | |
| ABT1-101 | VH | | | |
| ABT1-102 | VH | | | |
| ABT1-103 | VH | | | |
| ABT1-104 | VH | | | |
| ABT1-105 | VH | | | |
| ABT1-106 | VH | | | |
| ABT1-109 | VH | >500 | | |
| ABT1-110 | VH | | | |
| ABT1-111 | VH | | | |
| ABT1-113 | VH | >500 | | |
| ABT1-117 | VH | >500 | | |
| ABT1-118 | VH | | | |
| ABT1-119 | VK | | | |
| ABT1-120 | VK | | | |
| ABT1-121 | VK | | | |
| ABT1-122 | VK | 80 | 100 | |
| ABT1-122-18 | VK | 5 | 7 | |
| ABT1-122-21 | VK | 80 | 100 | |
| ABT1-122-511 | VK | 10 | 18 | |
| ABT1-122-750X | VK | | 0.713 | |
| ABT1-123 | VK | >500 | | |
| ABT1-124 | VK | | | |
| ABT1-125 | VK | | | |
| ABT1-126 | VK | | | |
| ABT1-127 | VK | | | |
| ABT1-128 | VK | | | |
| ABT1-129 | VK | | | |
| ABT1-130 | VK | 300 | | |
| ABT1-131 | VK | 80 | | |
| ABT1-132 | VK | 300 | | |
| ABT1-133 | VK | | | |
| ABT1-134 | VK | | | |
| ABT1-135 | VK | | | |
| ABT1-136 | VK | | | |
| ABT1-137 | VH | 200 | | |
| ABT1-138 | VH | >500 | | |
| ABT1-139 | VH | 80 | | |
| ABT1-140 | VH | | | |
| ABT1-141 | VK | 50 | 142 | |
| ABT1-141-1 | VK | >100 | | |
| ABT1-141-2 | VK | 100 | | |
| ABT1-141-3 | VK | 80 | | |
| ABT1-141-6 | VK | 20 | | |
| ABT1-141-7 | VK | 10 | | |
| ABT1-141-8 | VK | 10 | | |
| ABT1-141-9 | VK | 10 | | |
| ABT1-141-10 | VK | 30 | | |
| ABT1-141-11 | VK | | | |
| ABT1-141-12 | VK | | | |
| ABT1-141-13 | VK | | | |
| ABT1-141-14 | VK | 10 | | |
| ABT1-141-15 | VK | 50 | | |
| ABT1-141-16 | VK | 20 | | |
| ABT1-141-17 | VK | 30 | | |
| ABT1-141-18 | VK | 80 | | |
| ABT1-141-19 | VK | 50 | | |
| ABT1-141-20 | VK | 10 | | |
| ABT1-141-21 | VK | 60 | | |
| ABT1-141-22 | VK | 30 | | |
| ABT1-141-23 | VK | 80 | | |
| ABT1-141-24 | VK | | | |
| ABT1-141-25 | VK | 3 | 5 | |
| ABT1-141-27 | VK | 20 | | |
| ABT1-141-28 | VK | 200 | | |
| ABT1-141-29 | VK | | 20 | |
| ABT1-141-30 | VK | 40 | | |
| ABT1-141-31 | VK | | 2 | |
| ABT1-141-32 | VK | | 10 | |
| ABT1-141-33 | VK | | 3 | |
| ABT1-141-34 | VK | | 30 | |
| ABT1-141-35 | VK | 10 | | |
| ABT1-141-42 | VK | 3 | 5 | |
| ABT1-141-43 | VK | 3 | 5 | |
| ABT1-141-44 | VK | 3 | 5 | |
| ABT1-141-45 | VK | 100 | 100 | |
| ABT1-141-46 | VK | 3 | 1 | |
| ABT1-141-47 | VK | 1 | 1 | |
| ABT1-141-48 | VK | 3 | 1 | |
| ABT1-141-49 | VK | 3 | 5 | |
| ABT1-141-50 | VK | 10 | 20 | |
| ABT1-141-51 | VK | 10 | 20 | |
| ABT1-141-52 | VK | 100 | 100 | |
| ABT1-141-53 | VK | 50 | 10 | |
| ABT1-141-54 | VK | 3 | 5 | |
| ABT1-141-70 | VK | 1 | 1 | |
| ABT1-141-75 | VK | 3 | 5 | |
| ABT1-141-76 | VK | 1 | 1 | |
| ABT1-141-77 | VK | 3 | 1 | |
| ABT1-141-78 | VK | 3 | 0.7 | |
| ABT1-141-79 | VK | 3 | 2.4 | |
| ABT1-141-80 | VK | 3 | 1.7 | |
| ABT1-141-500 | VK | | | |
| ABT1-141-501 | VK | | | |
| ABT1-141-502 | VK | | | |
| ABT1-141-503 | VK | | | |
| ABT1-141-504 | VK | | | |
| ABT1-141-505 | VK | | | |
| ABT1-141-506 | VK | | | |
| ABT1-141-507 | VK | | | |
| ABT1-141-508 | VK | | | |
| ABT1-141-509 | VK | | | |
| ABT1-141-510 | VK | | | |
| ABT1-141-511 | VK | | | |
| ABT1-141-512 | VK | | | |
| ABT1-141-513 | VK | | | |
| ABT1-141-514 | VK | | | |
| ABT1-141-516 | VK | | | |
| ABT1-141-519 | VK | | | |
| ABT1-141-520 | VK | | | |
| ABT1-141-521 | VK | | | |
| ABT1-141-522 | VK | | | |
| ABT1-141-523 | VK | | | |
| ABT1-141-524 | VK | | | |
| ABT1-141-525 | VK | | | |
| ABT1-141-526 | VK | | | |
| ABT1-141-527 | VK | | | |
| ABT1-141-528 | VK | | | |
| ABT1-141-529 | VK | | | |
| ABT1-141-530 | VK | | | |
| ABT1-141-531 | VK | | 1 | |
| ABT1-141-532 | VK | | 2 | |
| ABT1-141-533 | VK | | | |
| ABT1-141-534 | VK | | | |
| ABT1-141-535 | VK | | | |
| ABT1-141-536 | VK | | | |
| ABT1-141-537 | VK | | | |
| ABT1-141-538 | VK | | | |
| ABT1-141-539 | VK | | | |
| ABT1-141-541 | VK | | | |
| ABT1-141-542 | VK | | | |
| ABT1-141-543 | VK | | | |
| ABT1-141-544 | VK | | | |
| ABT1-141-545 | VK | | | |
| ABT1-141-546 | VK | | | |
| ABT1-141-547 | VK | | | |
| ABT1-141-548 | VK | | | |
| ABT1-141-549 | VK | | | |
| ABT1-141-550 | VK | | | |
| ABT1-141-551 | VK | | | |
| ABT1-141-552 | VK | | | |
| ABT1-141-553 | VK | | | |
| ABT1-141-554 | VK | | | |
| ABT1-141-555 | VK | | | |
| ABT1-141-556 | VK | | | |
| ABT1-141-557 | VK | | | |
| ABT1-141-558 | VK | | | |
| ABT1-141-559 | VK | | | |
| ABT1-141-561 | VK | | | |
| ABT1-141-562 | VK | | >10 | |
| ABT1-141-563 | VK | | | |
| ABT1-141-564 | VK | | | |
| ABT1-141-565 | VK | | | |
| ABT1-141-567 | VK | | | |
| ABT1-141-568 | VK | | | |
| ABT1-141-569 | VK | | | |
| ABT1-141-572 | VK | | | |
| ABT1-141-573 | VK | | | |
| ABT1-141-574 | VK | | | |
| ABT1-142 | VK | 200 | | |
| ABT1-143 | VK | >500 | | |
| ABT1-144 | VK | 100 | | |
| ABT1-145 | VK | >500 | | |
| ABT1-146 | VK | >500 | | |
| ABT1-147 | VH | >500 | 300 | |
| ABT1-148 | VK | 400 | 100 | |
| ABT1-149 | VK | 100 | 100 | |
| ABT1-150 | VK | 150 | | |
| ABT1-151 | VK | 200 | | |
| ABT1-152 | VK | 300 | | |
| ABT1-153 | VK | 300 | | |
| ABT1-154 | VK | >1000 | | |
| ABT1-155 | VK | 20 | 20 | |
| ABT1-156 | VK | | | |
| ABT1-157 | VK | 300 | | |
| ABT1-158 | VK | 2 | <100 | |
| ABT1-159 | VK | 200 | | |
| ABT1-160 | VK | 300 | | |
| ABT1-161 | VK | >1000 | 8 | |
| ABT1-162 | VK | 1000 | 6.2 | |
| ABT1-163 | VK | 1000 | 105 | |
| ABT1-164 | VK | >1000 | 14 | |
| ABT1-165 | VK | >1000 | 1000 | |
| ABT1-166 | VK | >1000 | | |
| ABT1-167 | VK | >1000 | | |
| ABT1-168 | VK | >1000 | | |
| ABT1-169 | VK | 1000 | | |
| ABT1-170 | VK | >1000 | | |
| ABT1-171 | VK | >1000 | | |
| ABT1-172 | VK | >1000 | | |
| ABT1-221 | VK | | 100 | |

TABLE 63
ABT2 dAbs

| | | | ND₅₀ | K_{D} |
|---|---|---|---|---|
| Clone Name | dAb | IC₅₀ [nM] | [nM] | [nM] |
| ABT2-6 | VK | | >20000 | |
| ABT2-7 | VK | | >20000 | |
| ABT2-8 | VK | | >20000 | |
| ABT2-10 | VH | | 6000 | |
| ABT2-11 | VH | | >10000 | |
| ABT2-12 | VH | | | |
| ABT2-13 | VH | 175 | 1000 | |
| ABT2-14 | VH | | | |
| ABT2-15 | VH | | | |
| ABT2-16 | VH | | | |
| ABT2-17 | VH | | | |
| ABT2-19 | VH | | | |
| ABT2-20 | VH | | | |
| ABT2-21 | VH | | | |
| ABT2-22 | VH | | | |
| ABT2-23 | VH | 5000 | | |
| ABT2-24 | VH | 2000 | | |
| ABT2-25 | VH | | | |
| ABT2-26 | VH | | | |
| ABT2-27 | VH | | | |
| ABT2-28 | VH | | | |
| ABT2-29 | VH | | | |
| ABT2-30 | VH | | | |
| ABT2-31 | VH | | | |
| ABT2-32 | VH | 1000 | | |
| ABT2-33 | VH | | | |
| ABT2-35 | VH | | >10000 | |
| ABT2-36 | VH | | | |
| ABT2-37 | VH | | | |
| ABT2-38 | VH | | | |
| ABT2-39 | VH | | >10000 | |
| ABT2-40 | VH | | | |
| ABT2-41 | VH | | | |
| ABT2-42 | VK | 770 | | |
| ABT2-43 | VK | | >10000 | |
| ABT2-44 | VK | | | |
| ABT2-46 | VK | 390 | | |
| ABT2-53 | VK | | | |
| ABT2-54 | VK | | | |
| ABT2-55 | VK | | | |
| ABT2-56 | VK | | | |
| ABT2-57 | VK | | | |
| ABT2-58 | VK | | | |
| ABT2-59 | VK | 700 | >1000 | |
| ABT2-60 | VK | 1000 | >1000 | |
| ABT2-61 | VK | 1000 | >1000 | |
| ABT2-62 | VK | 1000 | >1000 | |
| ABT2-63 | VK | 1000 | | |
| ABT2-64 | VH | | >10000 | |
| ABT2-65 | VH | 100 | 505 | |
| ABT2-65-1 | VH | 100 | | |
| ABT2-65-2 | VH | 20 | | |
| ABT2-65-7 | VH | 30 | 200 | |
| ABT2-65-8 | VH | 10 | 3 | |
| ABT2-65-9 | VH | 100 | | |
| ABT2-65-10 | VH | 20 | | |
| ABT2-65-11 | VH | 50 | | |
| ABT2-65-12 | VH | 20 | | |
| ABT2-65-13 | VH | 20 | | |
| ABT2-65-14 | VH | 1000 | | |
| ABT2-65-15 | VH | 100 | | |
| ABT2-65-16 | VH | 200 | | |
| ABT2-65-17 | VH | 2.5 | 5 | |
| ABT2-65-18 | VH | 20 | | |
| ABT2-65-19 | VH | >1000 | | |
| ABT2-65-20 | VH | >1000 | | |
| ABT2-65-21 | VH | >1000 | | |
| ABT2-65-22 | VH | 100 | | |
| ABT2-65-23 | VH | 800 | | |
| ABT2-65-24 | VH | 50 | | |
| ABT2-65-25 | VH | 4 | | |
| ABT2-65-26 | VH | 20 | | |
| ABT2-65-27 | VH | 3.5 | | |
| ABT2-65-28 | VH | 5 | | |
| ABT2-65-29 | VH | 20 | | |
| ABT2-65-30 | VH | 20 | | |
| ABT2-65-31 | VH | 3 | | |
| ABT2-65-32 | VH | 4 | | |
| ABT2-65-33 | VH | 20 | | |
| ABT2-65-34 | VH | | 20 | |
| ABT2-65-35 | VH | | 4 | |
| ABT2-65-36 | VH | >1000 | | |
| ABT2-65-37 | VH | 100 | | |
| ABT2-65-38 | VH | 30 | | |
| ABT2-65-39 | VH | 300 | | |
| ABT2-65-40 | VH | | | |
| ABT2-65-41 | VH | >1000 | | |
| ABT2-65-42 | VH | >1000 | | |
| ABT2-65-43 | VH | | | |
| ABT2-65-44 | VH | >1000 | | |
| ABT2-65-45 | VH | >1000 | | |
| ABT2-65-46 | VH | 30 | | |
| ABT2-65-47 | VH | 20 | 80 | |
| ABT2-65-48 | VH | 20 | 80 | |
| ABT2-65-49 | VH | 20 | | |
| ABT2-65-50 | VH | | | |
| ABT2-65-51 | VH | | | |
| ABT2-65-52 | VH | | | |
| ABT2-65-53 | VH | | | |
| ABT2-65-54 | VH | | | |
| ABT2-65-55 | VH | | | |
| ABT2-65-56 | VH | | | |
| ABT2-65-57 | VH | | | |
| ABT2-65-58 | VH | | | |
| ABT2-65-59 | VH | | | |
| ABT2-65-6 | VH | 30 | >1000 | |
| ABT2-65-60 | VH | | | |
| ABT2-65-61 | VH | | | |
| ABT2-65-62 | VH | | | |
| ABT2-65-63 | VH | | | |
| ABT2-65-64 | VH | | | |
| ABT2-65-65 | VH | | | |
| ABT2-65-66 | VH | | | |
| ABT2-65-67 | VH | | | |
| ABT2-65-68 | VH | | | |
| ABT2-65-69 | VH | | | |
| ABT2-65-70 | VH | | | |
| ABT2-65-71 | VH | | | |
| ABT2-65-72 | VH | | | |
| ABT2-65-73 | VH | | | |
| ABT2-65-74 | VH | >1000 | | |
| ABT2-65-75 | VH | 30 | | |
| ABT2-65-76 | VH | 8 | | |
| ABT2-65-77 | VH | 50 | | |
| ABT2-65-78 | VH | 30 | | |
| ABT2-65-79 | VH | 6 | 2 | |
| ABT2-65-80 | VH | 7 | 0.5 | |
| ABT2-65-81 | VH | 10 | 2 | |
| ABT2-65-82 | VH | 8 | 2 | |
| ABT2-65-83 | VH | 300 | | |
| ABT2-65-84 | VH | 60 | | |
| ABT2-65-85 | VH | 7 | 2 | |
| ABT2-65-86 | VH | >1000 | | |
| ABT2-65-87 | VH | 50 | | |
| ABT2-65-88 | VH | 20 | | |
| ABT2-65-89 | VH | 10 | 2 | |
| ABT2-65-90 | VH | 300 | | |
| ABT2-65-113 | VH | 3.3 | 3 | |
| ABT2-65-114 | VH | 4 | | |
| ABT2-65-115 | VH | 4 | | |
| ABT2-65-116 | VH | | | |
| ABT2-65-117 | VH | 10 | | |
| ABT2-65-118 | VH | 4.6 | | |
| ABT2-65-119 | VH | 4 | | |
| ABT2-65-120 | VH | 4.2 | | |
| ABT2-65-121 | VH | 3.9 | | |
| ABT2-65-122 | VH | 3.8 | | |
| ABT2-65-123 | VH | | | |
| ABT2-65-124 | VH | 3.8 | | |
| ABT2-65-125 | VH | 4 | | |
| ABT2-65-126 | VH | 4.3 | | |
| ABT2-65-127 | VH | 5.5 | | |
| ABT2-65-128 | VH | | | |
| ABT2-65-129 | VH | 3.4 | | |
| ABT2-65-130 | VH | 4.3 | | |
| ABT2-65-131 | VH | 13.2 | | |
| ABT2-65-132 | VH | 5 | | |
| ABT2-65-133 | VH | 30 | | |
| ABT2-65-134 | VH | | | |
| ABT2-65-135 | VH | 5 | | |
| ABT2-65-136 | VH | | | |
| ABT2-65-137 | VH | 5 | | |
| ABT2-65-138 | VH | 5 | | |
| ABT2-65-139 | VH | 4 | | |
| ABT2-65-140 | VH | 2 | 1 | |
| ABT2-65-141 | VH | 5 | | |
| ABT2-65-142 | VH | | | |
| ABT2-65-143 | VH | 5 | | |
| ABT2-65-144 | VH | 6 | | |
| ABT2-65-145 | VH | 5 | | |
| ABT2-65-146 | VH | 6 | | |
| ABT2-65-147 | VH | | | |
| ABT2-65-148 | VH | 4 | | |
| ABT2-65-149 | VH | 4 | | |
| ABT2-65-150 | VH | | | |
| ABT2-65-151 | VH | 6 | | |
| ABT2-65-152 | VH | 5 | | |
| ABT2-65-154 | VH | 3 | 1.5 | |
| ABT2-65-155 | VH | 5 | | |
| ABT2-65-156 | VH | 5 | | |
| ABT2-65-157 | VH | | | |
| ABT2-65-158 | VH | 5 | | |
| ABT2-65-159 | VH | 5 | | |
| ABT2-65-160 | VH | | 2 | |
| ABT2-65-163 | VH | | 2 | |
| ABT2-65-166 | VH | 4 | 4 | |
| ABT2-65-167 | VH | 30 | | |
| ABT2-65-168 | VH | 30 | | |
| ABT2-65-169 | VH | 9 | | |
| ABT2-65-170 | VH | 10 | | |
| ABT2-65-171 | VH | 7.5 | | |
| ABT2-65-172 | VH | 6 | | |
| ABT2-65-173 | VH | 30 | | |
| ABT2-65-174 | VH | 10 | | |
| ABT2-65-175 | VH | 10 | | |
| ABT2-65-176 | VH | 5 | | |
| ABT2-65-177 | VH | 20 | | |
| ABT2-65-500 | VH | | | |
| ABT2-65-501 | VH | | | |
| ABT2-65-502 | VH | | 2 | |
| ABT2-65-503 | VH | | | |
| ABT2-65-504 | VH | | 4 | |
| ABT2-65-505 | VH | | | |
| ABT2-65-506 | VH | | | |
| ABT2-65-507 | VH | | | |
| ABT2-65-508 | VH | | | |
| ABT2-65-509 | VH | | | |
| ABT2-65-510 | VH | | 1 | |
| ABT2-65-511 | VH | | | |
| ABT2-65-512 | VH | | 3 | |
| ABT2-65-513 | VH | | | |
| ABT2-65-514 | VH | | | |
| ABT2-65-515 | VH | | | |
| ABT2-66 | VH | | >10000 | |
| ABT2-67 | VK | | >10000 | |
| ABT2-68 | VK | | >10000 | |
| ABT2-69 | VH | | >10000 | |
| ABT2-70 | VH | | | |
| ABT2-71 | VH | | | |
| ABT2-72 | VH | | >10000 | |
| ABT2-73 | VH | | | |
| ABT2-74 | VH | | | |
| ABT2-75 | VH | | | |
| ABT2-76 | VK | | 500 | |
| ABT2-77 | VK | | | |
| ABT2-79 | VK | | | |
| ABT2-80 | VK | >500 | | |
| ABT2-81 | VK | | | |
| ABT2-83 | VK | | | |
| ABT2-84 | VK | | | |
| ABT2-85 | VK | | | |
| ABT2-86 | VK | >500 | | |
| ABT2-87 | VK | | | |
| ABT2-88 | VK | | | |
| ABT2-89 | VK | | | |
| ABT2-90 | VK | | | |
| ABT2-91 | VK | >500 | | |
| ABT2-93 | VK | >500 | | |
| ABT2-94 | VK | >500 | | |
| ABT2-95 | VK | >500 | | |
| ABT2-96 | VK | >500 | | |
| ABT2-97 | VK | >500 | | |
| ABT2-98 | VK | >500 | | |
| ABT2-99 | VH | >500 | | |
| ABT2-101 | VH | >500 | | |
| ABT2-104 | VH | >500 | | |
| ABT2-105 | VH | >500 | | |
| ABT2-106 | VH | >500 | | |
| ABT2-107 | VH | >500 | | |
| ABT2-108 | VH | 70 | | |
| ABT2-108-533X | VH | | 5 | |
| ABT2-108-534X | VH | | | |
| ABT2-108-537X | VH | | 206 | |
| ABT2-108-538X | VH | | 5 | |
| ABT2-108-620X | VH | | | |

TABLE 64
DNA sequences for ABT1 and ABT2 dAbs

| | |
|---|---|
| dAb Name | DNA sequence |

ABT1 VH dAbs

| | |
|---|---|
| ABT1-6 | GAGGTGCAGCTGTTGGAGTCTGGGGGAGGCTTGGTACAGCCTGGGGGGTCCCTGCGTCTCTC |
| | CTGTGCAGCCTCCGGATTCACCTTTGGGGCTTATGATATGCAGTGGGTCCGCCAGGCTCCAG |
| | GGAAGGGTCTAGAGTGGGTCTCAAGTATTAATAAGTCTGGTGCTTTGACATCTTACGCAGAC |
| | TCCGTGAAGGGCCGGTTCACCATCTCCCGCGACAATTCCAAGAACACGCTGTATCTGCAAAT |
| | GAACAGCCTGCGTGCCGAGGACACCGCGGTATATTACTGTGCGAAAGGTTGGGCGTCTTTTG |
| | ACTACTGGGGCCAGGGAACCCTGGTCACCGTCTCGAGC (SEQ ID NO: 134) |
| ABT1-6-3 | GAGGTGCAGCTGTTGGAGTCTGGGGGAGGCTTGGTACAGCCTGGGGGGTCCCTGCGTCTCTC |
| | CTGTGCAGCCTCCGGATTCACCTTTGGGGCTTATGATATGCAGTGGGTCCGCCAGGCTCCAG |
| | GCAAGGGTCTAGAGTGGGTCTCAAGTATTTATAAGTCTGGTGCTTTGACATCTTACGCAGAC |
| | TCCGTGAAGGGCCGGTTCACCATCTCCCGCGACAATTCCAAGAACACGCTGTATCTGCAAAT |
| | GAACAGCCTGCGTGCCGAGGACACCGCGGTATATTACTGTGCGAAAGGTTGGGCGTCTTTTG |
| | ACTACTGGGGCCAGGGAACCCTGGTCACCGTCTCGAGC (SEQ ID NO: 135) |
| ABT1-6-23 | GAGGTGCAGCTGTTGGAGTCTGGGGGAGGCTTGGTACAGCCTGGGGGGTCCCTGCGTCTCTC |
| | CTGTGCAGCCTCCGGATTCACCTTTGTACGCTATGACATGGCATGGGTCCGCCAGGCTCCAG |
| | GgAAGGGTCTAGAGTGGGTCTCAAGTATTTATAAGTCTGGTGCTTTGACATCTTACGCAGAC |
| | TCCGTGAAGGGCCGGTTCACCATCTCCCGCGACAATTCCAAGAACACGCTGTATCTGCAAAT |
| | GAACAGCCTGCGTGCCGAGGACACCGCGGTATATTACTGTGCGAAAGGTTGGGCGTCTTTTG |
| | ACTACTGGGGCCAGGGAACCCTGGTCACCGTCTCGAGC (SEQ ID NO: 136) |
| ABT1-7 | GAGGTGCAGCTGTTGGAGTCTGGGGGAGGCTTGGTACAGCCTGGGGGGTCCCTGCGTCTCTC |
| | CTGTGCAGCCTCCGGATTCACCTTTAGGCGGTATCGGATGCAGTGGGTCCGCCAGGCTCCAG |
| | GGAAGGGTCTAGAGTGGGTCTCATCTATTAGTTGGGAGGGTACGAGGACACTTTACGCAGAC |
| | TCCGTGAAGGGCCGGTTCACCATCTCCCGCGACAATTCCAAGAACACGCTGTATCTGCAAAT |
| | GAACAGCCTGCGTGCCGAGGACACCGCGGTATATTACTGTGCGAAAGTGACTCAGAAGGGTT |
| | TGTTGAATTTTGACTACTGGGGCCAGGGAACCCTGGTCACCGTCTCGAGC (SEQ ID NO: |
| | 137) |
| ABT1-8 | GAGGTGCAGCTGTTGGAGTCTGGGGGAGGCTTGGTACAGCCTGGGGGGTCCCTGCGTCTCTC |
| | CTGTGCAGCCTCCGGATTCACCCTTAAGGCGTATAATATGTCGTGGGTCCGCCAGGCTCCAG |
| | GGAAGGGTCTAGAGTGGGTCTCACTGATTAGTAGTACGGGTATGTTTACAGATTACGCAGAC |
| | TCCGTGAAGGGCCGGTTCACCATCTCCCGCGACAATTCCAAGAACACGCTGTATCTGCAAAT |
| | GAACAGCCTGCGTGCCGAGGACACCGCGGTATATTACTGTGCGAAATGGGGGGTTAGGCGGG |
| | GGCTTTATTTTGACTACTGGGGCCAGGGAACCCTGGTCACCGTCTCGAGC (SEQ ID NO: |
| | 138) |
| ABT1-15 | GAGGTGCAGCTGTTGGAGTCTGGGGGAGGCTTGGTACAGCCTGGGGGGTCCCTGCGTCTCTC |
| | CTGTGCAGCCTCCGGATTCACCTTTGGGCGGTATCGGATGCAGTGGGTCCGCCAGGCTCCAG |
| | GGAAGGGTCTAGAGTGGGTCTCAAGTATTAATAAGTCTGGTGCTTTGACATCTTACGCAGAC |
| | TCCGTGAAGGGCCGGTTCACCATCTCCCGCGACAATTCCAAGAACACGCTGTATCTGCAAAT |
| | GAACAGCCTGCGTGCCGAGGACACCGCGGTATATTACTGTGCGAAAGGTTGGGCGTCTTTTG |
| | ACTACTGGGGCCAGGGAACCCTGGTCACCGTCTCGAGC (SEQ ID NO: 139) |
| ABT1-17 | GAGGTGCAGCTGTTGGAGTCTGGGGGAGGCTTGGTACAGCCTGGGGGGTCCCTGCGTCTCTC |
| | CTGTGCAGCCTCCGGATTCACCTTTAGGCGGTATCGGATGCCGTGGGTCCGCCAGGCTCCAG |
| | GGAAGGGTCTAGAGTGGGTCTCATCTATTAGTTGGGAGGGTACGAGGACACTTTACGCAGAC |
| | TCCGTGAAGGGCCGGTTCACCATCTCCCGCGACAATTCCAAGAACACGCTGTATCTGCAAAT |
| | GAACAGCCTGCGTGCCGAGGACACCGCGGTATATTACTGTGCGAAAGTGACTCAAAAGGGTT |
| | TGCTGAATTTTGACTACTGGGGCCAGGGAACCCTGGTCACCGTCTCGAGC (SEQ ID NO: |
| | 140) |
| ABT1-19 | GAGGTGCAGCTGTTGGAGTCTGGGGGAGGCTTGGTACAGCCTGGGGGGTCCCTGCGTCTCTC |
| | CTGTGCAGCCTCCGGATTCACCTTTCCTGTTTATAGTATGCCTTGGGTCCGCCAGGCTCCAG |
| | GGAAGGGTCTAGAGTGGGTCTCACTGATTCCGTGGCCTGGTTTGAGTACATACTACGCAGAC |
| | TCCGTGAAGGGCCGGTTCACCATCTCCCGCGACAATTCCAAGAACACGCTGTATCTGCAAAT |
| | GAACAGCCTGCGTGCCGAGGACACCGCGGTATATTACTGTGCGAAAGAGACGTCTAATTTTG |
| | ACTACTGGGGTCAGGGAACCCTGGTCACCGTCTCGAGC (seq id no: 141) |
| ABT1-20 | GAGGTGCAGCTGTTGGAGACTGGGGGAGGCTTGGTACAGCCTGGGGGGTCCCTGCGTCTCTC |
| | CTGTGCAGCCTCCGGATTCACCTTTACGCCTTATCGGATGGGGTGGGTCCGCCAGGCTCCAG |
| | GGAAGGGTCTAGAGTGGGTCTCACATATTGGGATTTGGGGTGCTAATACATACTACGCAGAC |
| | TCCGTGAAGGGCCGGTTCACCATCTCCCGCGACAATTCCAAGAACACGCTGTATCTGCAAAT |
| | GAACAGCCTGCGCGCCGAGGACACCGCGGTATATTACTGTGCGAAACATCCGAGGCCTTTTG |
| | ACTACTGGGGTCAGGGAACCCTGGTCACCGTCTCGAGC (seq id no: 142) |
| ABT1-21 | GAGGTGCAGCTGTTGGAGTCTGGGGGAGGCTTGGTACAGCCTGGGGGGTCCCTGCGTCTCTC |
| | CTGTGCAGCCTCCGGATTCACCTTTAGGCCGTATGCGATGACTTGGGTCCGCCAGGCTCCAG |
| | GGAAGGGTCTAGAGTGGGTCTCAACTATTGGGCGGACGGGTACTCGTACATACTACGCAGAC |
| | TCCGTGAAGGGCCGGTTCACCATCTCCCGCGACAATTCCAAGAACACGCTGTATCTGCAAAT |
| | GAACAGCCTGCGTGCCGAGGACACCGCGGTATATTACTGTGCGAAAGGGCGGCGGAGGTTTG |
| | ACTACTGGGGTCAGGGAACCCTGGTCACCGTCTCGAGC (seq id no: 143) |
| ABT1-22 | GAGGTGCAGCTGTTGGAGTCTGGGGGAGGCTTGGTACAGCCTGGGGGGTCCCTGCGTCTCTC |
| | CTGTGCAGCCTCCGGATTCACCCTTAAGGCGTATAATATGTCGTGGGTCCGCCAGGCTCCAG |
| | GGAAGGGTCTAGAGTGGGTCTCACTGATTAGTAGTACGGGTATGTTTACAGATTACGCAGAC |
| | TCCGTGAAGGGCCGGTTCACCATCTCCCGCGACAATTCCAAGAACACGCTGTATCTGCAAAT |
| | GAACAGCCTGCGTGCCGAGGACACCGCGGTATATTACTGTGCGAAATGGGGGGTTAGGCGGG |
| | GGCTTTATTTTGACTACTGGGGCCAGGGAACCCTGGTCACCGTCTCGAGC (seq id no: |
| | 144) |
| ABT1-23 | GAGGTGCAGCTGTTGGAGTCTGGGGGAGGCTTGGTACAGCCTGGGGGGTCCCTGCGTCTCTC |
| | CTGTGCAGCCTCCGGATTCACCTTTTCGTCGTATCCTATGGAGTGGGTCCGCCAGGCTCCAG |
| | GGAAGGGTCTAGAGTGGGTCTCAGCGATTGCGTGGCCGGGTAGTATGACATACTACGCAGAC |
| | TCCGTGAAGGGCCGGTTCACCATCTCCCGCGACAATTCCAAGAACACGCTGTATCTGCAAAT |
| | GAACAGCCTGCGTGCCGAGGACACCGCGGTATATTACTGTGCGAAAACGCATCGGCTTTTTG |
| | ACTACTGGGGTCAGGGAACCCTGGTCACCGTCTCGAGC (seq id no: 145) |
| ABT1-31 | GAGGTGCAGCTGTTGGAGTCTGGGGGAGGCTTGGTACAGCCTGGGGGGTCCCTGCGTCTCTC |
| | CTGTGCAGCCTCCGGATTCACCTTTAGCAGCTATGCCATGAGCTGGGTCCGCCAGGCTCCAG |
| | GGAAGGGTCTAGAGTGGGTCTCAGGTATTAATCGGTCTGGTACGCGTACATACTACGCAGAC |
| | TCCGTGAAGGGCCGGTTCACCATCTCCCGCGACAATTCCAAGAACACGCTGTATCTGCAAAT |
| | GAACAGCCTGCGTGCCGAGGACACCGCGGTATATTACTGTGCGAAAAGGATTCGTCATTTTG |
| | ACTACTGGGGTCAGGGAACCCTGGTCACCGTCTCGAGC (seq id no: 146) |
| ABT1-32 | GAGGTGCAGCTGTTGGAGTCTGGGGGAGGCTTGGTACAGCCTGGGGGGTCCCTGCGTCTCTC |
| | CTGTGCAGCCTCCGGATTCACCTTTCCTGATTATGATATGAAGTGGGTCCGCCAGGCTCCAG |
| | GGAAGGGTCTAGAGTGGGTCTCAGCTATTAGTGGTAGTGGTGGTAGCACATACTACGCAGAC |
| | TCCGTGAAGGGCCGGTTCACCATCTCCCGCGACAACTCCAAGAACACGCTGTATCTGCAAAT |
| | GAACAGCCTGCGTGCCGAGGACACCGCTGTATATTACTGTGCGAAAATTGTTGGTTTTGCGT |
| | GGGATTATTTTGACTACTGGGGCCAGGGAACCCTGGTCACCGTCTCGAGC (seq id no: |
| | 147) |
| ABT1-33 | GAGGTGCAGCTGTTGGAGTCTGGGGGAGGCTTGGTACAGCCTGGGGGGTCCCTGCGTCTCTC |
| | CTGTGCAGCCTCCGGATACACCTTTAGGAGTTATAGTATGAATTGGGTCCGCCAGGCTCCAG |
| | GGAAGGGTCTAGAGTGGGTCTCAGCGATTAGTCCGCATGGTACGTATACAAAGTACGCAGAC |
| | TCCGTGAAGGGCCGGTTCACCATCTCCCGCGACAATTCCAAGAACACGCTGTATCTGCAAAT |
| | GAACAGCCTGCGTGCCGAGGACACCGCGGTATATTACTGTGCGAAACGGCGTATTCGTTCTT |
| | CGGGTTTTTTTGACTACTGGGGCCAGGGAACCCTGGTCACCGTCTCGAGC(seq id no: |
| | 148) |
| ABT1-34 | GAGGTGCAGCTGTTGGAGTCTGGGGGAGGCTTGGTACAGCCTGGGGGGTCCCTGCGTCTCTC |
| | CTGTGCAGCCTCCGGATTCACCTTTGCTAGGTATTCGATGAGTTGGGTCCGCCAGGCTCCAG |
| | GGAAGGGTCTAGAGTGGGTCTCAATGATTGCTCCTGCGGGTAGGATGACATTGTACGCAGAC |
| | TCCGTGAAGGGCCGGTTCACCATCTCCCGCGACAATTCCAAGAACACGCTGTATCTGCAAAT |
| | GAACAGCCTGCGTGCCGAGGACACCGCGGTATATTACTGTGCGAAAACGGGTTTGACTCGGA |
| | GGACGCGGTTTGACTACTGGGGCCAGGGAACCCTGGTCACCGTCTCGAGC (seq id no: |
| | 149) |
| ABT1-35 | GAGGTGCAGCTGTTGGAGTCTGGGGGAGGCTTGGTACAGCCTGGGGGGTCCCTGCGTCTCTC |
| | CTGTGCAGCCTCCGGATTCACCTTTAAGTTGTATGAGATGGAGTGGGTCCGCCAGGCTCCAG |
| | GGAAGGGTCTAGAGTGGGTCTCACGGATTGATAGTATGGGTGGGATTACAGAGTACGCAGAC |
| | TCCGTGAAGGGCCGGTTCACCATCTCCCGCGACAATTCCAAGAACACGCTGTATCTGCAAAT |
| | GAACAGCCTGCGTGCCGAGGACACCGCGGTATATTACTGTGCGAAAACTGAGCTTCCTTATC |
| | CTTCGGCTTTTGACTACTGGGGCCAGGGAACCCTGGTCACCGTCTCGAGC (seq id no: |
| | 150) |
| ABT1-36 | GAGGTGCAGCTGTTGGAGTCTGGGGGAGGCTTGGTACAGCCTGGGGGGTCCCTGCGTCTCTC |
| | CTGTGCAGCCTCCGGATTCACCTTTAGCAGCTATGCCATGAGCTGGGTCCGCCAGGCTCCAG |
| | GGAAGGGTCTAGAGTGGGTCTCATCTATTTCGTCGGGTGGTAGTGCTACAGCGTACGCAGAC |
| | TCCGTGATGGGCCGGTTCACCATCTCCCGCGACAATTCCAAGAACACGCTGTATCTGCAAAT |
| | GAACAGCCTGCGTGCCGAGGACGCCGCGGTATATTACTGTGCGAAAAGGTCTTATCTGTTTG |
| | ACTACTGGGGCCAGGGAACCCTGGTCACCGTCTCGAGC (seq id no: 151) |
| ABT1-37 | GAGGTGCAGCTGTTGGAGTCTGGGGGAGGCTTGGTACAGCCTGGGGGGTCCCTGCGTCTCTC |
| | CTGTGCAGCCTCCGGATTCACCTTTCATGATTATGATATGAAGTGGGTCCGCCAGGCTCCAG |
| | GGAAGGGTCTAGAGTGGGTCTCATGGATTTCGTTTGATGGTGCTCGGACATTTTACGCAGAC |
| | TCCGTGCAGGGCCGGTTCACCATCTCCCGCGACAATTCCAAGAACACGCTGTATCTGCAAAT |
| | GAACAGCCTGCGTGCCGAGGACACCGCGGTATATTACTGTGCGAAAGAGGAGACGGGTTTTG |
| | ACTACTGGGGCCAGGGAACCCTGGTCACCGTCTCGAGC (seq id no: 152) |
| ABT1-38 | GAGGTGCAGCTGTTGGAGTCTGGGGGAGGCTTGGTACAGCCTGGGGGGTCCCTGCGTCTCTC |
| | CTGTGCAGCCTCCGGATTCACCTTTAGGCAGTATCGGATGGGGTGGGTCCGCCAGGCTCCAG |
| | GGAGGGGTCTAGAGTGGGTCTCACGGATTGAGAGTGATGGTGCGGAGACATCTTACGCAGAC |
| | TCCGTGAAGGGCCGGTTCACCATCTCCCGCGACAATTCCAAGAACACGCTGTATCTGCAAAT |
| | GAACAGCCTGCGTGCCGAGGACACCGCGGTATATTACTGTGCGAAACCTGATTGGATTTTTG |
| | ACTACAGGGGCCAGGGAACCCTGGTCACCGTCTCGAGC (seq id no: 153) |
| ABT1-40 | GAGGTGCAGCTGTTGGAGTCTGGGGGAGGCTTGGTACAGCCTGGGGGGTCCCTGCGTCTCTC |
| | CTGTGCAGCCTCCGGATTCACCTTTCCTATTTATTTTATGGTTTGGGTCCGCCAGGCTCCAG |
| | GGAAGGGTCTAGAGTGGGTCTCACTGATTAGTAGTACGGGTATGTTTACAGATTACGCAGAC |
| | TCCGTGAAGGGCCGGTTCACCATCTCCCGCGACAATTCCAAGAACACGCTGTATCTGCAAAT |
| | GAACAGCCTGCGTGCCGAGGACACCGCGGTATATTACTGTGCGAAATGGGGGGTTAGGCGGG |
| | GGCTTTATTTTGACTACTGGGGCCAGGGAACCCTGGTCACCGTCTCGAGC (seq id no: |
| | 154) |
| ABT1-41 | GAGGTGCAGCTGTTGGAGTCTGGGGGAGGCTTGGTACAGCCTGGGGGGTCCCTGCGTCTCTC |
| | CTGTGCAGCCTCCGGATTCACCTTTCAGTATTATGTTATGGGTTGGGTCCGCCAGGCTCCAG |
| | GGAAGGGTCTAGAGTGGGTCTCATGGATTGCTACGTATGGTAGTCATACATGGTACGCAGAC |
| | TCCGTGAAGGGCCGGTTCACCATCTCCCGCGACAATTCCAAGAACACGCTGTATCTGCAAAT |
| | GAACAGCCTGCGTGCCGAGGACACCGCGGTATATTACTGTGCGAAACAGGGTAATCATCGTT |
| | TGGGTCATTTTGACTACTGGGGCCAGGGAACCCTGGTCACCGTCTCGAGC (seq id no: |
| | 155) |
| ABT1-42 | GAGGTGCAGCTGTTGGAGTCTGGGGGAGGCTTGGTACAGCCTGGGGGGTCCCTGCGTCTCTC |
| | CTGTGCAGCCTCCGGATTCACCTTTGAGAAGTATGAGATGGCGTGGGTCCGCCAGGCTCCAG |
| | GGAAGGGTCTAGAGTGGGTCTCAGCTATTGGGCCTATGGGTTTTGGTACAAATTACGCAGAC |
| | TCCGTGAAGGGCCGGTTCACCATCTCCCGCGACAATTCCAAGAACACGCTGTATCTGCAAAT |
| | GAACAGCCTGCGTGCCGAGGACACCGCGGTATATTACTGTGCGAAATTTGGGAAGCATCCTC |
| | CGGGTACTTTTGACTACTGGGGCCAGGGAACCCTGGTCACCGTCTCGAGC (seq id no: |
| | 156) |
| ABT1-43 | GAGGTGCAGCTGTTGGAGTCTGGGGGAGGCTTGGTACAGCCTGGGGGGTCCCTGCGTCTCTC |
| | CTGTGCAGCCTCCGGATTCACCTTTGAGAAGTATGAGATGGCGTGGGTCCGCCAGGCTCCAG |
| | GGAAGGGTCTAGAGTGGGTCTCAGCTATTGGGCCTATGGGTTTTGGTACAAATTACGCAGAC |
| | TCCGTGAAGGGCCGGTTCACCATCTCCCGCGACAATTCCAAGAACACGCTGTATCTGCAAAT |
| | GAACAGCCTGCGTGCCGAGGACACCGCGGTATATTACTGTGCGAAATTTGGGAAGCATCCTC |
| | AGGGTACTTTTGACTACTGGGGCCAGGGAACCCTGGTCACCGTCTCGAGC (seq id no: |
| | 157) |
| ABT1-45 | GAGGTGCAGCTGTTGGAGTCTGGGGGAGGCTTGGTACAGCCTGGGGGGTCCCTGCGCCTCTC |
| | CTGTGCAGCCTCCGGATTCACCTTTCATAATTATAGGATGTTGTGGGTCCGCCAGGCTCCAG |
| | GGAAGGGTCTAGAGTGGGTCTCAGCTATTAGTGGTAGTGGTGGTAGCACATACTACGCAGAC |
| | TCCGTGAAGGGCCGGTTCACCATCTCCCGCGACAATTCCAAGAACACGCTGTATCTGCAAAT |
| | GAACAGCCTGCGTGCCGAGGACACCGCGGTATATTACTGTGCGAAATCGGCGCCTATTCCGA |
| | TGAGTATGTTTGACTACTGGGGCCAGGGAACCCTGGTCACCGTCTCGAGC (seq id no: |
| | 158) |
| ABT1-46 | GAGGTGCAGCTGTTGGAGTCTGGGGGAGGCTTGGTACAGCCTGGGGGGTCCCTGCGTCTCTC |
| | CTGTGCAGCCTCCGGATTCACCTTTGGGAATTATATGATGGATTGGGTCCGCCAGGCTCCAG |
| | GGAAGGGTCTAGAGTGGGTCTCAGCTATTAGTGGTAGTGGTGGTAGCACATACTACGCAGAC |
| | TCCGTGAAGGGCCGGTTCACCATCTCCCGCGACAATTCCAAGAACACGCTGTATCTGCAAAT |
| | GAACAGCCTGCGTGCCGAGGACACCGCGGTATATTACTGTGCGAAACTGGGGCATCCGATGG |
| | GTAATGGTTTTGACTACTGGGGCCAGGGAACCCTGGTCACCGTCTCGAGC (seq id no: |
| | 159) |
| ABT1-47 | GAGGTGCAGCTGTTGGAGTCTGGGGGAGGCTTGGTACAGCCTGGGGGGTCCCTGCGTCTCTC |
| | CTGTGCAGCCTCCGGATTCACCTTTGGGGCTTATGATATGCACTGGGTCCGCCAGGCTCCAG |
| | GGAAGGGTCTAGAGTGGGTCTCATGTATTAATAAGTCTGGTGCTTTGACATCTTACGCAGAC |
| | TCCGTGAAGGGCCGGTTCACCATCTCCCGCGACAATTCCAAGAACACGCTGTATCTGCAAAT |
| | GAACAGCCTGCGTGCCGAGGACACCGCGGTATATTACTGTGCGAAAGGTTGTTAGTCTTTTG |
| | ACTACTGGGGCCAGGGAACCCTGGTCACCGTCTCGAGC (seq id no: 160) |
| ABT1-49 | GAGGTGCAGCTGTTGGAGTCTGGGGGAGGCTTGGTACAGCCTGGGGGGTCCCTGCGTCTCTC |
| | CTGTGCAGCCTCCGGATTCACCTTTAATTTGTATGCGATGAGGTGGGTCCGCCAGGCTCCAG |
| | GGAAGGGTCTAGAGTGGGTCTCAGCTATTTCGCCGATGGGTAAGGGTACATATTACGCAGAC |
| | TCCGTGAAGGGCCGGTTCACCATCTCCCGCGACAATTCCAAGAACACGCTGTATCTGCAAAT |
| | GAACAGCCTGCGTGCCGAGGACACCGCGGTATATTACTGTGCGAAAGTGGGGTATATTTTTG |
| | ACTACTGGGGCCAGGGAACCCTGGTCACCGTCTCGAGC (seq id no: 161) |
| ABT1-50 | GAGGTGCAGCTGTTGGAGTCTGGGGGAGGCTTGGTACAGCCTGGGGGGTCCCTGCGTCTCT |
| | CCTGTGCAGCCACCGGATTCACCTTTAGCAGCTATGCCATGAGCTGGGTCCGCCAGGCTCC |
| | AGGGAAGGGTCTAGAGTGGGTCTCATCTATTTCGTCGGGTGGTAGTGCTACAGCGTACGCA |
| | GACTCCGTGAAGGGCCGGTTCACCATCTCCCGCGACAATTCCAAGAACACGCTGTATCTGC |
| | AAATGAACAGCCTGCGTGCCGAGGACACCGCGGTATATTACTGTGCGAAAAGGTCTTATCT |
| | GTTTGACTACTGGGGCCAGGGAACCCTGGTCACCGTCTCGAGC (SEQ ID NO: 162) |
| ABT1-51 | GAGGTGCAGCTGTTGGAGTCTGGGGGAGGCTTGGTACAGCCTGGGGGGTCCCTGCGTCTCTC |
| | CTGTGCAGCCTCCGGATTCACCTTTAGCAGCTATGCCATGAGCTGGGTCCGCCAGGCTCCAG |
| | GGAAGGGTCTAGAGTGGGTCTCAGCTATTAGTGGTAGTGGTGGTAGCACATACTACGCAGAC |
| | TCCGTGAAGGGCCGGTTCACCATCTCCCGTGACAATTCCAAGAACACGCTGTATCTGCAAAT |
| | GAACAGCCTGCGTGCCGAGGACACCGCGGTATATTACTGTGCGAAAAGTTATGGTGCTTTTG |
| | ACTACTGGGGCCAGGGAACCCTGGTCACCGTCTCGAGC (seq id no: 163) |
| ABT1-52 | GAGGTGCAGCTGTTGGAGTCTGGGGGAGGCTTGGTACAGCCTGGGGGGTCCCTGCGTCTCTC |
| | CTGTGCAGCCTCCGGATTCACCTTTAGGAGTTATCGGATGAGTTGGGTCCGCCAGGCTCCAG |
| | GGAAGGGTCTAGAGTGGGTCTCAAGTATTTCTGCTATGGGTCGTCGTACACTTTACGCAGAC |
| | TCCGTGAAGGGCCGGTTCACCATCTCCCGCGACAATTCCAAGAACACGCTGTATCTGCAAAT |
| | GAACAGCCTGCGTGCCGAGGACACCGCGGTATATTACTGTGCGAAAGTTGGGGCGCGTTTTG |
| | ACTACTGGGGCCAGGGAACCCTGGTCACCGTCTCGAGC (seq id no: 164) |
| ABT1-75 | GAGGTGCAGCTGTTGGAGTCTGGGGGAGGCTTGGTACAGCCTGGGGGGTCCCTGCGTCTCTC |
| | CTGTGCAGCCTCCGGATTCACCTTTAGCAGCTATGCCATGAGCTGGGTCCGCCAGGCTCCAG |
| | GGAAGGGTCTAGAGTGGGTCTCAACGATTACTCCTGGTGGTTCTGGGACATACTACGCAGAC |
| | TCCGTGAAGGGCCGGTTCACCATCTCCCGCGACAATTCCAAGAACACGCTGTATCTGCAAAT |
| | GAACAGCCTGCGTGCCGAGGACACCGCGGTATATTACTGTGCGAAAAGGAAGTTTGCTTTTG |
| | ACTACTGGGGTCAGGGAACCCTGGTCACCGTCTCGAGC (seq id no: 165) |
| ABT1-76 | GAGGTGCAGCTGTTGGAGTCTGGGGGAGGCTTGGTACAGCCTGGGGGGTCCCTGCGTCTCTC |
| | CTGTGCAGCCTCCGGATTCACCTTTCCTCTTTATGATATGTCGTGGGTCCGCCAGGCTCCAG |
| | GGAAGGGTCTAGAGTGGGTCTCAAGGATTCGTGCGAATGGTGGTCGGACATACTACGCAGAC |
| | TCCGTGAAGGGCCGGTTCACCATCTCCCGCGACAATTCCAAGAACACGCTGTATCTGCAAAT |
| | GAACAGCCTGCGTGCCGAGGACACCGCGGTATATTACTGTGCGAAAACGGCGGCTTGGGTTA |
| | AGGGTAATTTTGACTACTGGGGTCAGGGAACCCTGGTCACCGTCTCGAGC (seq id no: |
| | 166) |
| ABT1-77 | GAGGTGCAGCTGTTGGAGTCTGGGGGAGGCTTGGTACAGCCTGGGGGGTCCCTGCGTCTCTC |
| | CTGTGCAGCCTCCGGATTCACCTTTGTGCGTTATTCTATGCTGTGGGTCCGCCAGGCTCCAG |
| | GGAAGGGTCTAGAGTGGGTCTCAGCTATTAGTGGTAGTGGTGGTAGCACATACTACGCAGAC |
| | TCCGTGAAGGGCCGGTTCACCATCTCCCGCGACAATTCCAAGAACACGCTGTATCTGCAAAT |
| | GAACAGCCTGCGTGCCGAGGATACCGCGGTATATTACTGTGCGAAACCTTCTAGGATGAGTC |
| | TTAAGAAGTTTGACTACTGGGGTCAGGGAACCCTGGTCACCGTCTCGAGC (seq id no: |
| | 167) |
| ABT1-78 | GAGGTGCAGCTGTTGGAGTCTGGGGGAGGCTTGGTACAGCCTGGGGGGTCCCTGCGTCTCTC |
| | CTGTGCAGCCTCCGGATTCACCTTTGGGCATTATACGATGACTTGGGTCCGCCAGGCTCCAG |
| | GGAAGGGTCCAGAGTGGGTCTCAGCTATTAGTGGTAGTGGTGGTAGCACATACTACGCAGAC |
| | TCCGTGAAGGGCCGGTTCACCATCTCCCGCGACAATTCCAAGAACACGCTGTATCTGCAAAT |
| | GAACAGCCTGCGTGCCGAGGACACCGCGGTATATTACTGTGCGAAAAGTATTGAGCTGTCGG |
| | GTGGGGCGTTTGACTACTGGGGCCAGGGAACCCTGGTCACCGTCTCGAGC (seq id no: |
| | 168) |
| ABT1-79 | GAGGTGCAGCTGTTGGAGTCTGGGGGAGGCTTGGTACAGCCTGGGGGGTCCCTGCGTCTCTC |
| | CTGTGCAGCCTCCGGATTCACCTTTGAGGATTATCATATGGCTTGGGTCCGCCAGGCTCCAG |
| | GGAAGGGTCTAGAGTGGGTCTCAGCTATTAGTGGTAGTGGTGGTAGCACATACTACGCAGAC |
| | TCCGTGAAGGGCCGGTTCACCATCTCCCGCGACAATTCCAAGAACACGCTGTATCTGCAAAT |
| | GAACAGCCTGCGTGCCGAGGACACCGCGGTATATTACTGTGCGAAAAAGGCTTCTGGTCGTC |
| | GTTCGATGTTTGACTACTGGGGCCAGGGAACCCTGGTCACCGTCTCGAGC (seq id no: |
| | 169) |
| ABT1-81 | GAGGTGCAGCTGTTGGAGTCTGGGGGAGGCTTGGTACAGCCTGGGGGGTCCCTGCGTCTCTC |
| | CTGTGCAGCCTCCGGATTCACCTTTAGCAGCTATGCCATGAGCTGGGTCCGCCAGGCTCCAG |
| | GGAAGGGTCTAGAGTGGGTCTCAGCTATTAGTGGTAGTGGTGGTAGCACATACTACGCAGAC |
| | TCCGTGAAGGGCCGGTTCACCATCTCCCGCGACAATTCCAAGAACACGCTGTATCTGCAAAT |
| | GAACAGCCTGCGTGCCGAGGACACCGCGGTATATTACTGTGCGAAAGCTCGGGTGGCGCCGG |
| | CTGTTCTGTTTGACTACCGGGGCCAGGGAACCCTGGTCACCGTCTCGAGC (seq id no: |
| | 170) |
| ABT1-84 | GAGGTGCAGCTGTCGGAGTCTGGGGGAGGCTTGGTACAGCCTGGGGGGTCCCTGCGTCTCTC |
| | CTGTGCAGCCTCCGGATTCACCTTTAATGATTATAGGATGGTGTGGGCCCGCCAGGCTCCAG |
| | GGAAGGGTCTAGAGTGGGTCTCAACTATTAGTAAGTCTGGTCGGACTACATACTACGCAGAC |
| | TCCGTGAAGGGCCGGTTCACCATCTCCCGCGACAATTCCAAGAACACGCTGTATCTGCAAAT |
| | GAACAGCCTGCGTGCCGAGGATACCGCGGTATATTACTGTGCGAAATATACGATTCCGTTTG |
| | ACTACTGGGGTCAGGGAACCCTGGTCACCGTCTCGAGC (seq id no: 171) |
| ABT1-85 | GAGGTGCAGCTGTTGGAGTCTGGGGGAGGCTTGGTACAGCCTGGGGGGTCCCTGCGTCTCTC |
| | CTGTGCAGCCTCCGGACTCACCTTTAGTTTGTATGGGATGGCGTGGGCCCGCCAGGCTCCAG |
| | GGAAGGGTCTAGAGTGGGTCTCAAGTATTTCGTCTAGTGGTAGTAGTACATACTACGCAGAC |
| | TCCGTGAAGGGCCGGTTCACCATCTCCCGCGACAATTCCAAGAACACGCTGTATCTGCAAAT |
| | GAACAGCCTGCGTGCCGAGGACACCGCGGTATATTACTGTGCGAAACAGCGTTGGTCTCATG |
| | GTAGTGTGCTTGGTTTTGACTACTGGGGTCAGGGAACCCTGGTCACCGTCTCGAGC (seq |
| | id no: 172) |
| ABT1-86 | GAGGTGCAGCTGTTGGAGTCTGGGGGAGGCTTGGTACAGCCTGGGGGGTCCCTGCGTCTCTC |
| | CTGTGCAGCCTCCGGATTCACCTTTGATCGTTATATTATGGCTTGGGTCCGCCAGGCTCCAG |
| | GGAAGGGTCTGGAGTGGGTCTCATCGATTACTCCTAGTGGTGCTGCTACATACTACGCAGAC |
| | TCCGTGAAGGGCCGGTTCACCATCTCCCGCGACAATTCCAAGAACACGCTGTATCTGCAAAT |
| | GAACAGCCTGCGTGCCGAGGACACCGCGGTATATTACTGTGCGGAAGAGCCTGCTGATAGGT |
| | ATAGTACGTGGACTTTTGACTACTGGGGTCAGGGAACCCTGGTCACCGTCTCGAGC (seq |
| | id no: 173) |
| ABT1-87 | GAGGTGCAGCTGTTGGAGTCTGGGGGAGGCTTGGTACAGCCTGGGGGGTCCCTGCGTCTCTC |
| | CTGTGCAGCCTCCGGATTCACCTTTGGGGCGTATAATATGAATTGGGTCCGCCAGGCTCCAG |
| | GGAAGGGTCTAGAGTGGGTCTCAACTATTTCTGCTTCGGGTCGTTATACATACTACGCAGAC |
| | TCCGTGAAGGGCCGGTTCACCATCTTCCGCGACAATTCCAAGAACACGCTGTATCTGCAAAT |
| | GAACAGCCTGCGTGCCGAGGACACCGCGGTATATTACTGTGCGGAAGGGTTTATTTCTGTGG |
| | ATGAGTATGTGCCGTATCATTTTGACTACTGGGGTCAGGGAACCCTGGTCACCGTCTCGAGC |
| | (seq id no: 174) |
| ABT1-88 | GAGGTGCAGCTGTTGGAGTCTGGGGGAGGCTTGGTACAGCCTGGGGGGTCCCTGCGTCTCTC |
| | CTGTGCAGCCTCCGGATTCACCTTTAGGTTGTATAAGATGTCTTGGGTCCGCCAGGCTCCAG |
| | GGAAGGGTCTAGAGTGGGTCTCAAGTATTAGTTCTAATGGTGAGGGGACATACTACGCAGAC |
| | TCCGTGAAGGGCCGGTTCACCATCTCCCGCGACAATTCCAAGAACACGCTGTATCTGCAAAT |
| | GAACAGCCTGCGTGCCGAGGACACCGCGGTATATTACTGTGCGAAAACTTTGTATCTGTGGG |
| | GGTCGAGGCAGGCTTTTGACTACTGGGGTCAGGGAACCCTGGTCACCGTCTCGAGC (seq |
| | id no: 175) |
| ABT1-89 | GAGGTGCAGCTGTTGGAGTCTGGGGGAGGCTTGGTACAGCCTGGGGGGTCCCTGCGTCTCTC |
| | CTGTGCAGCCTCCGGATTCACCTTTCGGTTGTATGGGATGAATTGGGTCCGCCAGGCTCCAG |
| | GGAAGGGTCTAGAGTGGGTCTCAGCTATTTCTTCGGATGGTCAGAGGACATACTACGCAGAC |
| | TCCGTGAAGGGCCGGTTCACCATCTCCCGCGACAATTCCAAGAACACGCTGTATCTGCAAAT |
| | GAACAGCCTGCGTGCCGAGGACACCGCGGTATATTACTGTGCGAAAGGGTGGTTGAGGGGTC |
| | ATAATCTTATGCGGACGGAGTTTGACTACTGGGGTCAGGGAACCCTGGTCACCGTCTCGAGC |
| | (seq id no: 176) |
| ABT1-90 | GAGGTGCAGCTGTTGGAGTCTGGGGGAGGCTTGGTACAGCCTGGGGGGTCCCTGCGTCTCT |
| | CCTGTGCAGCCTCCGGATTCACCTTTCATGATTATTGGATGACGTGGGTCCGCCAGGCTCC |
| | AGGGAAGGGTCTGGAGTGGGTCTCATCTATTTCTGCTTTGGGTGGTGCTACATACTACGCA |
| | GACTCCGTGAAGGGCCGGTTCACCATCTCCCGCGACAATTCCAAGAACACGCTGTATCTGC |
| | AAATGAACAGCCTGCGTGCCGAGGACACCGCGGTATATTACTGTGCGAAAGGGCTTCTTCG |
| | GGAGCCGCAGTGGCGGCAGGGTTTTGACTACTGGGGTCAGGGAACCCTGGTCACCGTCTCG |
| | AGC (SEQ ID NO: 177) |
| ABT1-91 | GAGGTGCAGCTGTTGGAGTCTGGGGGAGGCTTGGTACAGCCTGGGGGGTCCCTGCGTCTCTC |
| | CTGTGCAGCCTCCGGATTCACCTTTACGGATTATACTATGATGTGGGTCCGCCAGGCTCCAG |
| | GGAAGGGTCTAGAGTGGGTCTCAAGTATTGAGCGGSATGGTCGGCGGACATACTACGCAGAC |
| | TCCGTGAAGGGCCGGTTCACCATCTCCCGCGACAATTCCAAGAACACGCTGTATCTGCAAAT |
| | GAACAGCCTGCGTGCCGAGGATACCGCGGTATATTACTGTGCGAAAGGGCAGGCGAAGTTTT |
| | TTGACTACTGGGGTCAGGGAACCCTGGTCACCGTCTCGAGC (seq id no: 178) |
| ABT1-92 | GAGGTGCAGCTGTTGGAGTCTGGGGGAGGCTTGGTACAGCCTGGGGGGTCCCTGCGTCTCTC |
| | CTGTGCAGCCTCCGGATTCACCTTTTCTACGTATACTATGACTTGGGTCCGCCAGGCTCCAG |
| | GGAAGGGTCTAGAGTGGGTCTCAACTATTTTTCCTGGGGGTTCGACGACATACTACGCAGAC |
| | TCCGTGAAGGGCCGGTTCACCATCTCCCGCGACAATTCCAAGAACACGCTGTATCTGCAAAT |
| | GAACAGCCTGCGTGCCGAGGACACCGCGGTATATTACTGTGCGAAATATGTTGATTTTGTGA |
| | AGTTGTCTTTTGACTACTGGGGTCAGAGAACCCTGGTCACCGTCTCGAGC (seq id no: |
| | 179) |
| ABT1-93 | GAGGTGCAGCTGTTGGAGTCTGGGGGAGGCTTGGTACAGCCTGGGGGGTCCCTGCGTCTCTC |
| | CTGTGCAGCCTCCGGATTCACCTTTAATGAGTATAATATGGTGTGGGTCCGCCAGGCTCCAG |
| | GGAAGGGTCTAGAGTGGGTCTCAAGTATTTCTGGGGGTGGTGGGTTTACATACTACGCAGAC |
| | TCCGTGAAGGGCCGGTTCACCATCTCCCGCGACAATTCCAAGAACACGCTGTATCTGCAAAT |
| | GAACAGCCTGCGTGCCGAGGATACCGCGGTATATTACTGTGCGAAACCTCTGAGGGGGTTTG |
| | TGTGTTCGCAGCATTGTTCTTTTGACTACTGGGGTCAGGGAACCCTGGTCACCGTCTCGAGC |
| | (seq id no: 180) |
| ABT1-94 | GAGGTGCAGCTGTTGGAGTCTGGGGGAGGCTTGGTACAGCCTGGGGGGTCCCTGCGTCTCTC |
| | CTGTGCAGCCTCCGGATTCACCTTTCATGTGTATGATATGGGGTGGGTCCGCCAGGCTCCAG |
| | GGAAGGGTCTAGAGTGGGTCTCATTTATTGATCGGATGGGTCGTCGTACATACTACGCAGAC |
| | TCCGTGAAGGGCCGGTTCACCATCTCCCGCGACAATTCCAAGAACACGCTGTATCTGCAAAT |
| | GAACAGCCTGCGTGCCGAGGATACCGCGGTATATTACTGTGCGAAACCTGGGTATCCGTTTG |
| | ACTACTGGGGTCAGGGAACCCTGGTCACCGTCTCGAGC (seq id no: 181) |
| ABT1-96 | GAGGTGCAGCTGTTGGAGTCTGGGGGAGGCTTGGTACAGCCTGGGGGGTCCCTGCGTCTCTC |
| | CTGTGCAGCCTCCGGATTCACCTTTAATCAGTATAATATGTTTTGGGTCCGCCAGGCTCCAG |
| | GGAAGGGTCTAGAGTGGGTCTCAGTTATTAGTGGTTCGGGTCGGTTTACATACTACGCAGAC |
| | TCCGTGAAGGGCCGGTTCACCATCTCCCGCGACAATTCCAAGAACACGCTGTATCTGCAAAT |
| | GAACAGCCTGCGTGCCGAGGATACCGCGGTATATTACTGTGCGAAAGGGTGGTGGAGGCGTG |
| | ATCCTCCTTTTGACTACTGGGGTCAGGGAACCCTGGTCACCGTCTCGAGC (seq id no: |
| | 182) |
| ABT1-97 | GAGGTGCAGCTGTTGGAGTCTGGGGGAGGCTTGGTACAGCCTGGGGGGTCCCTGCGTCTCTC |
| | CTGTGCAGCCTCCGGATTCACCTTTTGGGAGTATGATATGTATTGGGTCCGCCAGGCTCCAG |
| | GGAAGGGTCTAGAGTGGGTCTCACGGATTTCTGGTTCGGGTCGTTATACATACTACGCAGAC |
| | TCCGTGAAGGGCCGGTTCACCATCTCCCGCGACAATTCCAAGAACACGCTGTATCTGCAAAT |
| | GAACAGCCTGCGTGCCGAGGACACCGCGGTATATTACTGTGCGAAAAGGTCGCTTACTCGTC |
| | CGAGTCAGTTTGACTACTGGGGTCAGGGAACCCTGGTCACCGTCTCGAGC (seq id no: |
| | 183) |
| ABT1-98 | GAGGTGCAGCTGTTGGAGTCTGGGGGAGGCTTGGTACAGCCTGGGGGGTCCCTGCGTCTCTC |
| | CTGTGCAGCCTCCGGATTCACCTTTGATGGTTATATTATGTCGTGGGTCCGCCAGGCTCCAG |
| | GGAAGGGTCTAGAGTGGGTCTCAACTATTAGTCCGTTGGGTTCTGTTACATACTACGCAGAC |
| | TCCGTGAAGGGCCGGTTCACCATCTCCCGCGACAATTCCAAGAACACGCTGTATCTGCAAAT |
| | GAACAGCCTGCGTGCCGAGGACACCGCGGTATATTACTGTGCGAAAAAGGGGCCGTGGTTTG |
| | ACTACTGGGGTCAGGGAACCCTGGTCACCGTCTCGAGC (seq id no: 184) |
| ABT1-99 | GAGGTGCAGCTGTTGGAGTCTGGGGGAGGCTTGGTACAGCCTGGGGGGTCCCTGCGTCTCTC |
| | CTGTGCAGCCTCCGGATTCACCTTTGGTAAGTATTCTATGACGTGGGTCCGCCAGGCTCCAG |
| | GGAAGGGTCTAGAGTGGGTCTCAGTTATTGATCCGTGGGGTCATTATACATACTACGCAGAC |
| | TCCGTGAAGGGCCGGTTCACCATCTCCCGCGACAATTCCAAGAACACGCTGTATCTGCAAAT |
| | GAACAGCCTGCGTGCCGAGGACACCGCGGTATATTACTGTGCGAAATCGGTTGATGCTACGC |
| | TGTTGCGTAGGTATTTTGACTACTGGGGTCAGGGAACCCTGGTCACCGTCTCGAGC (seq |
| | id no: 185) |
| ABT1-101 | GAGGTGCAGCTGTTGGAGTCTGGGGGAGGCTTGGTACAGCCTGGGGGGTCCCTGCGTCTCTC |
| | CTGTGCAGCCTCCGGATTCACCTTTTCGAAGTATTGGATGAGTTGGGTCCGCCAGGCTCCAG |
| | GGAAGGGTCTGGAGTGGGTCTCATCTATTTCTCCTGATGGTAAGACTACATACTACGCAGAC |
| | TCCGTGAAGGGCCGGTTCACCATCTCCCGCGACAATTCCAAGAACACGCTGTATCTGCAAAT |
| | GAACAGCCTGCGTGCCGAGGACACCGCGGTATATTACTGTGCGAAAGGTGCGTTTGCGTTTG |
| | ACTACTGGGGTCAGGGAACCCTGGTCACCGTCTCGAGC (SEQ ID NO: 186) |
| ABT1-102 | GAGGTGCAGCTGTTGGAGTCTGGGGGAGGCTTGGTACAGCCTGGGGGGTCCCTGCGTCTCTC |
| | CTGTGCAGCCTCCGGATTCACCTTTCGGAATTATGCGATGTCTTGGGTCCGCCAGGCTCCAG |
| | GGAAGGGTCTAGAGTGGGTCTCAACGATTACTCCGCTGGGTTCTAGTACATACTATGCAGAC |
| | TCCGTGAAGGGCCGGTTCACCATCTCCCGCGACAATTCCAAGAACACGCTGTATCTGCAAAT |
| | GAACAGCCTGCGTGCCGAGGACACCGCGGTATATTACTGTGCGAAAAGGGCGTGGGCTTTTG |
| | ACTACTGGGGTCAGGGAA-CCTGGTCACCGTCTCGAGC (seq id no: 187) |
| ABT1-103 | GAGGTGCAGCTGTTGGAGTCTGGGGGAGGCTTGGTACGGCCTGGGGGGTCCCTGCGTCTCTC |
| | CTGTGCAGCCTCCGGATTCACCTTTGAGCGGTATTGGATGACTTGGGTCCGCCAGGCTCCAG |
| | GGAAGGGTCTAGAGTGGGTCTCATATATTTCGAGTAGTGGTACGGCTACATACTACGCAGAC |
| | TCCGTGAAGGGCCGGTTCACCATCTCCCGCGACAATTCCAAGAACACGCTGTATCTGCAAAT |
| | GAACAGCCTGCGTGCCGAGGACACCGCGGTATATTACTGTGCGAAAGGGGCTCCGAATTTTG |
| | ACTACTGGGGTCAGGGAACCCTGGTCACCGTCTCGAGC (seq id no: 188) |
| ABT1-104 | GAGGTGCAGCTGTTGGAGTCTGGGGGAGGCTTGGTACAGCCTGGGGGGTCCCTGCGTCTCTC |
| | CTGTGCAGCCTCCGGATTCACCTTTAAGTCTTATCCTATGCGTTGGGTCCGCCAGGCTCCAG |
| | GGAAGGGTCTAGAGTGGGTCTCAACGATTAGTCCTTTGGGTTCTACGACATACTACGCAGAC |
| | TCCGTGAAGGGCCGGTTCACCATCTCCCGCGACAATTCCAAGAACACGCTGTATCTGCAAAT |
| | GAACAGCCTGCGTGCCGAGGACACCGCGGTATATTACTGTGCGAAAGCTTCTTATTCTTTTG |
| | ACTACTGGGGTCAGGGAACCCTGGTCACCGTCTCGAGC (seq id no: 189) |
| ABT1-105 | GAGGTGCAGCTGTTGGAGTCTGGGGGAGGCTTGGTACAGCCTGGGGGGTCCCTGCGTCTCTC |
| | CTGTGCAGCCTCTGGATTCACCTTTTCGCAGTATCGTATGTTTTGGGCCCGCCAGGCTCCAG |
| | GGAAGGGTCTAGAGTGGGTCTCAACTATTAGTACTTCGGGTAATAAGACATACTACGCAGAC |
| | TCCGTGAAGGGCCGGTTCACCATCTCCCGCGACAATTCCAAGAACACGCTGTATCTGCAAAT |
| | GAACAGCCTGCGTGCCGAGGACACCGCGGTATATTACTGTGCGAAAGTTTCTAAGCCGTTTG |
| | ACTACTGGGGTCAGGGAACCCTGGTCACCGTCTCGAGC (seq id no: 190) |
| ABT1-106 | GAGGTGCAGCTGTTGGAGTCTGGGGGAGGCTTGGTACAGCCTGGGGGGTCCCTGCGTCTCTC |
| | CTGTGCAGCCTCCGGATTCACCTTTGAGAATTATACTATGAAGTGGGTCCGCCAGGCTCCAG |
| | GGAAGGGTCTAGAGTGGGTCTCATCTATTTCGCCTGTTGGTTCGGTTACATACTACGCAGAC |
| | TCCGTGAAGGGCCGGTTCACCATCTCCCGCGACAATTCCAAGAACACGCTGTATCTGCAAAT |
| | GAACAGCCTGCGTGCCGAGGATACCGCGGTATATTACTGTGCGAAACCGTCGCCTTTTTTTG |
| | ACTACTGGGGTCAGGGAACCCTGGTCACCGTCTCGAGC (seq id no: 191) |
| ABT1-109 | GAGGTGCAGCTGTTGGAGTCTGGGGGAGGCTTGGTACAGCCTGGGGGGTCCCTGCGTCTCTC |
| | CTGTGCAGCCTCCGGATTCACCTTTGCTGGGTATAATATGATGTGGGTCCGCCAGGCTCCAG |
| | GGAAGGGTCTAGAGTGGGTCTCAACTATTGCGTATGATGGTTATCGTACATACTACGCAGAC |
| | TCCGTGAAGGGCCGGTTCACCATCTCCCGCGACAATTCCAAGAACACGCTGTATCTGCAAAT |
| | GAACAGCCTGCGTGCCGAGGACACCGCGGTATATTACTGTGCGAAAAATATGCAGATTACTA |
| | GGCCGCGTCCGACGTTTGACTACTGGGGTCAGGGAACCCTGGTCACCGTCTCGAGC (seq |
| | id no: 192) |
| ABT1-110 | GAGGTGCAGCTGTTGGAGTCTGGGGGAGGCTTGGTACAGCCTGGGGGGTCCCTGCGTCTCTC |
| | CTGTGCAGCCTCCGGATTCACCTTTAGTCGGTATAATATGATGTGGGTCCGCCAGGCTCCAG |
| | GGAAGGGTCTAGAGTGGGTCTCAACTATTTCGTATGATGGTTTTCGTACATACTACGCAGAC |
| | TCCGTGAAGGGCCGGTTCACCATCTCCCGCGACAATTCCAAGAACACGCTGTATCTGCAAAT |
| | GAACAGCCTGCGTGCCGAGGACACCGCGGTATATTACTGTGCGAAAAATCATTCTACTCAGG |
| | GTAAGGCGAATGTGTCTGACTACTGGGGTCAGGGAACCCTGGTCACCGTCTCGAGC (seq |
| | id no: 193) |
| ABT1-111 | GAGGTGCAGCTGTTGGAGTCTGGGGGAGGCTTGGTACAGCCTGGGGGGTCCCTGCGTCTCTC |
| | CTGTGCAGCCTCCGGATTCACCTTTTCTAATTATGGTATGCAGTGGGTCCGCCAGGCTCCAG |
| | GGAAGGGTCTAGAGTGGGTCTCATATATTAGTGGTTCTGGTTTGCTTACATACTACGCAGAC |
| | TCCGTGAAGGGCCGGTTCACCATCTCCCGCGACAATTCCAAGAACACGCTGTATCTGCAAAT |
| | GAACAGCCTGCGTGCCGAGGATACCGCGGTATATTACTGTGCGAAATCTGATGTGGGTTTGC |
| | GGCTGCCTGCTTCTTTTGACTACTGGGGTCAGGGAACCCTGGTCACCGTCTCGAGC (SEQ |
| | ID NO: 194) |
| ABT1-113 | GAGGTGCAGCTGTTGGAGTCTGGGGGAGGCTTGGTACAGCCTGGGGGGTCCCTGCGTCTCTC |
| | CTGTGCAGCCTCCGGATTCACCTTTCAGAATTATGATATGACGTGGGTCCGCCAGGCTCCAG |
| | GGAAGGGTCTAGAGTGGGTCTCAACGATTTCTAGTGGTGGTTCGTTGACATACTACGCAGAC |
| | TCCGTGAAGGGCCGGTTCACCATCTCCCGCGACAATTCCAAGAACACGCTGTATCTGCAAAT |
| | GAACAGCCTGCGTGCCGAGGACACCGCGGTATATTACTGTGCGAAACTTAGTTATCGTTGGT |
| | CGTATACGTTTTCGGATTTTGACTACTGGGGTCAGGGAACCCTGGTCACCGTCTCGAGC |
| | (SEQ ID NO: 195) |
| ABT1-117 | GAGGTGCAGCTGTTGGAGTCCGGGGGAGGCTTGGTACAGCCTGGGGGGTCCCTGCGTCTCTC |
| | CTGTGCAGCCTCCGGATTCACCTTTGCGGGGTATGATATGCTGTGGGTCCGCCAGGCTCCAG |
| | GGAAGGGTCTAGAGTGGGTCTCAATGATTCTGGGGACTGGTAGTGGTACATACTACGCAGAC |
| | TCCGTGAAGGGCCGGTTCACCATCTCCCGCGACAATTCCAAGAACACGCTGTATCTGCAAAT |
| | GAACAGCCTGCGTGCCGAGGACACCGCGGTATATTACTGTGCGAAACGG (SEQ ID NO: |
| | 196) |
| ABT1-118 | GAGGTGCAGCTGTTGGAGTCTGGGGGAGGCTTGGTACAGCCTGGGGGGTCCCTGCGTCTCTC |
| | CTGTGCAGCCTCCGGATTCACCTTTGGGGCGTATACTATGTATTGGGTCCGCCAGGCTCCAG |
| | GGAAGGGTCTAGAGTGGGTCTCACATATTTCGCCGGTGGGTTCTGATACATACTACGCAGAC |
| | TCCGTGAAGGGCCGGTTCACCATCTCCCGCGACAATTCCAAGAACACGCTGTATCTGCAAAT |
| | GAACAGCCTGCGTGCCGAGGACACCGCGGTATATTACTGTGCGAAATTTGTTTTTTTGGCGG |
| | GGCGTTTGCCTACTTTTGACTACTGGGGTCAGGGAACCCTGGTCACCGTCTCGAGC (SEQ |
| | ID NO: 197) |
| ABT1-137 | GAGGTGCAGCTGTTGGAGTCTGGGGGAGGCTTGGTACAGCCTGGGGGGTCCCTGCGTCTCTC |
| | CTGTGCAGCCTCCGGATTCACCTTTGAGAGGTATTGGATGGCTTGGGTCCGCCAGGCTCCAG |
| | GGAAGGGTCTAGAGTGGGTCTCAAATATTAATCTTACTGGTAGTGCGACATACTACGCAGAC |
| | TCCGTGAAGGGCCGGTTCACCATCTCCCGCGACAATTCCAAGAACACGCTGTATCTGCAAAT |
| | GAACAGCCTGCGTGCCGAGGATACCGCGGTATATTACTGTGCGAAAGGGGCTTTTCAGTTTG |
| | ACTACTGGGGTCAGGGAACCCTGGTCACCGTCTCGAGC (SEQ ID NO: 198) |
| ABT1-138 | GAGGTGCAGCTGTTGGAGTCTGGGGGAGGCTTGGTACAGCCTGGGGGGTCCCTGCGTCTCTC |
| | CTGTGCAGCCTCCGGATTCACCTTTAATGAGTATCTTATGTATTGGGTCCGCCAGGCTCCAG |
| | GGAAGGGTCTGGAGTGGGTCTCATCTATTAGTCCGCTTGGTTATCATACATACTACGCAGAC |
| | TCCGTGAAGGGCCGGTTCACCATCTCCCGCGACAATTCCAAGAACACGCTGTATCTGCAAAT |
| | GAACAGCCTGCGTGCCGAGGACACCGCGGTATATTACTGTGCGAAACGTGCTCGGTGGTATT |
| | TTGACTACTGGGGTCAGGGAACCCTGGTCACCGTCTCGAGC (SEQ ID NO: 843) |
| ABT1-139 | GAGGTGCAGCTGTTGGAGTCTGGGGGAGGCTTGGTACAGCCTGGGGGGTCCCTGCGTCTCTC |
| | CTGTGCAGCCTCCGGATTTACCTTTTCTGATTATACGATGATTTGGGTCCGCCAGGCTCCAG |
| | GGAAGGGTCTGGAGTGGGTCTCATCTATTTCGGCTCGTGGTTGGGGTACATACTACGCAGAC |
| | TCCGTGAAGGGCCGGTTCACCATCTCCCGCGACAATTCCAAGAACACGCTGTATCTGCAAAT |
| | GAACAGCCTGCGTGCCGAGGACACCGCGGTATATTACTGTGCGAAAGGTAGTCCTCAGCTTG |
| | TTCTGCCTTTTGACTACTGGGGTCAGGGAACCCTGGTCACCGTCTCGAGC (SEQ ID |
| | NO: 199) |
| ABT1-140 | GAGGTGCAGCTGTTGGAGTCTGGGGGAGGCTTGGTACAGCCTGGGGGGTCCCTGCGTCTCTC |
| | CTGTGCAGCCTCCGGATTCACCTTTGAGGATTATGAGATGGATTGGGTCCGCCAGGCTCCAG |
| | GGAAGGGTCTAGAGTGGGTCTCAACTATTTCTCCTCATGGTCTGCTTACATACTACGCAGAC |
| | TCCGTGAAGGGCCGGTTCACCATCTCCCGCGACAATTCCAAGAACACGCTGTATCTGCAAAT |
| | GAACAGCCTGCGTGCCGAGGACACCGCGGTATATTACTGTGCGAAACGTTTGTGGCCTCAGA |
| | GGAAGTGGACTTTTGACTACTGGGGTCAGGGAACCCTGGTCACCGTCTCGAGC (SEQ ID |
| | NO: 200) |
| ABT1-147 | GAGGTGCAGCTGTTGGAGTCTGGGGGAGGCTTGGTACAGCCTGGGGGGTCCCTGCGTCTCTC |
| | CTGTGCAGCCTCCGGATTCACCTTTTCTACTTATAATATGATGTGGGTCCGCCAGGCTCCAG |
| | GGAAGGGTCTAGAGTGGGTCTCAAGTATTACGCATGAGGGTACGATGACATACTACGCAGAC |
| | TCCGTGAAGGGCCGGTTCACCATCTCCCGCGACAATTCCAAGAACACGCTGTATCTGCAAAT |
| | GAACAGCCTGCGTGCCGAGGACACCGCGGTATATTACTGTGCGAAAAATGGTCGTATTAGTC |
| | AGAATCGGTTTGACTACTGGGGTCAGGGAACCCTGGTCACCGTCTCGAGC (SEQ ID |
| | NO: 201) |

ABT1 VK dAbs

| | |
|---|---|
| ABT1-3 | GACATCCAGATGACCCAGTCTCCATCCTCCCTGTCTGCATCTGTAGGAGACCGTGTCACCAT |
| | CACTTGCCGGGCAAGTCAGAGCATTTGGACGGAGTTAAAGTGGTACCAGCAGAAACCAGGGA |
| | AAGCCCCTAAGCTCCTGATCTATGGTGCATCCCTGTTGCAAAGTGGGGTCCCATCACGTTTC |
| | AGTGGCAGTGGATCTGGGACAGATTTCACTCTCACCATCAGCAGTCTGCAACCTGAAGATTT |
| | TGCTACGTACTACTGTCAACAGTTTGCGTATTTTCCTTTTACGTTCGGCCAAGGGACCAAGG |
| | TGGAAATCAAACGG (SEQ ID NO: 202) |
| ABT1-9 | GACATCCAGATGACCCAGTCTCCATCCTCCCTGTCTGCATCTGTAGGAGACCGTGTCACCAT |
| | CACTTGCCGGGCAAGTCAGAGCATTGGTTCGTCGTTACTTTGGTACCAGCAGAAACCAGGGA |
| | AAGCCCCTAAGCTCCTGATCTATTTGGCATCCCGTTTGCAAAGTGGGGTCCCATCACGTTTC |
| | AGTGGCAGTGGATCTGGGACAGACTTCACTCTCACCATCAGCAGTCTGCAACCTGAAGATTT |
| | TGCTACGTACTACTGTCAACAGTTTCGGTCTACGCCTAATACGTTCGGCCAAGGGACCAAGG |
| | TGGAAATCAAACGG (SEQ ID NO: 203) |
| ABT1-9- | GATATTCAGATGACCCAGAGCCCGAGCAGCCTGAGCGCGAGCGTGGGCGATCGTGTGACCAT |
| 500 | TACCTGCCGTGCGAGCCATCGTATTCAGGTGAGCCTGAACTGGTATCAGCGTAAACCGGGCA |
| | AAGCGCCGAAACTGCTGGTGTATCTGGCGAGCCGTCTGCAGAGCGGCGTGCCGAGCCGTTTT |
| | AGCGGCAGCGGCAGCGGCAGCGATTTTACCCTGACCATTAGCAGCCTGCAGCCGGGCGATTT |
| | TGCGACCTATTATTGCCAGCAGTTTCGTAGCACCCCGAACACCTTTGGCCAGGGCACCAAAG |
| | TGGAAATTCGTCGT (SEQ ID NO: 204) |
| ABT1-10 | GACATCCAGATGACCCAGTCTCCATCCTCCCTGTCTGCATCTGTAGGAGACCGTGTCACCAT |
| | CACTTGCCGGGCAAGTCAGAGCATTGTGCCGAATTTAAGGTGGTACCAGCAGAAACCAGGGA |
| | AAGCCCCTAAGCTCCTGATCTATGGTGCATCCACGTTGCAAAGTGGGGTCCCATCACGTTTC |
| | AGTGGCAGTGGATCTGGGACAGATTTCACTCTCACCATCAGCAGTCTGCAACCTGAAGATTT |
| | TGCTACGTACTACTGTCAACAGGGTTATGTTTATCCTGGGACGTTCGGCCAAGGGACCAAGG |
| | TGGAAATCAAACGG (SEQ ID NO: 205) |
| ABT1-11 | GACATCCAGATGACCCAGTCTCCATCCTCCCTGTCTGCATCTGTAGGAGACCGTGTCACCAT |
| | CACTTGCCGGGCAAGTCAGAGCATTCCGTATAATTTACGTTGGTACCAGCAGAAACCAGGGA |
| | AAGCCCCTAAGCTCCTGATCTATAGTGCATCCCGGTTGCAAAGTGGGGTCCCATCACGTTTC |
| | AGTGGCAGTGGATCTGGGACAGATTTCACTCTCACCATCAGCAGTCTGCAACCTGAAGATTT |
| | TGCTACGTACTACTGTCAACAGGGGTATAGTTGGCCTATGACGTTCGGCCAAGGGACCAAGG |
| | TGGAAATCAAACGG (SEQ ID NO: 206) |
| ABT1-12 | GACATCCAGATGACCCAGTCTCCATCCTCCCTGTCTGCATCTGTAGGAGACCGTGTCACCAT |
| | CACTTGCCGGGCAAGTCAGAGCATTTGGACGGAGTTAAAGTGGTACCAGCAGAAACCAGGGA |
| | AAGCCCCTAAGCTCCTGATCTATGGTGCATCCCTGTTGCAAAGTGGGGTCCCATCACGTTTC |
| | AGTGGCAGTGGATCTGGGACAGATTTCACTCTCACCATCAGCAGTCTGCAACCTGAAGATTT |
| | TGCTACGTACTACTGTCAACAGTTTGCGTATTTTCCTTTTACGTTCGGCCAAGGGACCAAGG |
| | TGGAAATCAAACGG (SEQ ID NO: 207) |
| ABT1-13 | GACATCCAGATGACCCAGTCTCCATCCTCCCTGTCTGCATCTGTAGGAGACCGTGTCACCAT |
| | CACTTGCCGGGCAAGTCAGAGCATTCGTACTTTTTTAAATTGGTACCAGCAGAAACCAGGGA |
| | AAGCCCCTAAGCTCCTGATCTATTGGGCATCCCCTTTGCAAAGTGGGGTCCCATCACGTTTC |
| | AGTGGCAGTGGATCTGGGACAGATTTCACTCTCACCATCAGCAGTCTGCAACCTGAAGATTT |
| | TGCTACGTACTACTGTCAACAGACTAGTCGGGCTCCTTATACGTTCGGCCAAGGGACCAAGG |
| | TGGAAATCAAACGG (seq id no: 208) |
| ABT1-14 | GACATCCAGATGACCCAGTCTCCATCCTCCCTGTCTGCATCTGTAGGAGACCGTGTCACCAT |
| | CACTTGCCGGGCAAGTCAGAGCATTTGGACGGAGTTAAAGTGGTACCAGCAGAAACCAGGGA |
| | AAGCCCCTAAGCTCCTGATCTATGGTGCATCCCTGTTGCAAAGTGGGGTCCCATCACGTTTC |
| | AGTGGCAGTGGATCTGGGACAGATTTCACTCTCACCATCAGCAGTCTGCAACCTGAAGATTT |
| | TGCTACGTACTACTGTCAACAGTTTGCGTATTTTCCTTTTACGTTCGGCCAAGGGACCAAGG |
| | TGGAAATCAAACGG (SEQ ID NO: 209) |
| ABT1-18 | GACATCCAGATGACCCAGTCTCCATCCTCCCTGTCTGCATCTGTAGGAGACCGTGTCACCAT |
| | CACTTGCCGGGCAAGTCAGAGCATTCAGCGTTGGTTAGCTTGGTACCAGCAGAAACCAGGGA |
| | AAGCCCCTAAGCTCCTGATCTATTTTGCATCCCAGTTGCAAAGTGGGGTCCCATCACGTTTC |
| | AGTGGCAGTGGATCTGGGACAGATTTCACTCTCACCATCAGCAGTCTGCAACCTGAAGATTT |
| | TGCTACGTACTACTGTCAACAGTTGCTGAGGTTGCCTAAGACGTTCGGCCAAGGGACCAAGG |
| | TGGAAATCAAACGG (SEQ ID NO: 210) |
| ABT1-24 | GACATCCAGATGACCCAGTCTCCATCCTCCCTGTCTGCATCTGTAGGAGACCGTGTCACCAT |
| | CACTTGCCGGGCAAGTCAGAGCATTAGGGCTAAGTTACGTTGGTACCAGCAGAAACCAGGGA |
| | AAGCCCCTAAGCTCCTGATCTATAGGGCATCCCAGTTGCAAAGTGGGGTCCCATCACGTTTC |
| | AGTGGCAGTGGATCTGGGACAGATTTCACTCTCACCATCAGCAGTCTGCAACCTGAAGATTT |
| | TGCTACGTACTACTGTCAACAGAGGGCTCGGCATCCTCATACGTTCGGCGAAGGGACCAAGG |
| | TGGAAATCAAACGG (SEQ ID NO: 211) |
| ABT1-25 | GACATCCAGATGACCCAGTCTCCATCCTCCCTGTCTGCATCTGTAGGAGACCGTGCCACCAT |
| | CACTTGCCGGGCAAGTCAGAGCATTAGGGCTAAGTTACGTTGGTACCAGCAGAAACCAGGGA |
| | AAGCCCCTAAGCTCCTGATCTATAGGGCATCCCAGTTGCAAAGTGGGGTCCCATCACGTTTC |
| | AGTGGCAGTGGATCTGGGACAGATTTCACTCTCACCATGAGCAGTCTGCAACCTGAAGATTT |
| | TGCTACGTACTACTGTCAACAGAGGGCTCGGCATCCTCATACGTTCGGCCAAGGGACCAAGG |
| | TGGAAATCAAACGG (SEQ ID NO: 212) |
| ABT1-26 | GACATCCAGATGACCCAGTCTCCATCCTCCCTGTCTGCATCCGTAGGAGACCGTGTCACCAT |
| | CACTTGCCGGGCAAGTCAGAGCATTGGTAATGTTTTACGGTGGTACCAGCAGAAACCAGGGA |
| | AAGCCCCTAAGCTCCTGATCTATCGTGCAGCCATGTTGCAAAGTGGGGTCCCATCACGTTTC |
| | AGTGGCAGTGGATCTGGGACAGATTTCACTCTCACCATCAGCAGTCTGCAACCTGAAGATTT |
| | TGCTACGTACTACTGTCAACAGAGGCGGACTTATCCTTGGACGTTCGGCCAAGGGACCAAGG |
| | TGGAAATCAAACGG (SEQ ID NO: 213) |
| ABT1-27 | GACATCCAGATGACCCAGTCTCCATCCTCCCTGTCTGCATCTGTAGGAGACCGTGTCACCAT |
| | CACTTGCCGGGCAAGTCAGAGCATTAAGCAGAAGTTAAAGTGGTACCAGCAGAAACCAGGGA |
| | AAGCCCCTAAGCTCCTGATCTATTGGGCATCCCATTTGCAAAGTGGGGTCCCATCACGTTTC |
| | AGTGGCAGTGGATCTGGGACAGATTTCACTCTCACCATCAGCAGTCTGCAACCTGAAGATTT |
| | TGCTACGTACTACTGTCAACAGCGGCATCTGAAGCCTTATACGTTCGGCCAAGGGACCAAGG |
| | TGGAAATCAAACGG (SEQ ID NO: 214) |
| ABT1-28 | GACATCCAGATGACCCAGTCTCCATCCTCCCTGTCTGCATCTGTAGGAGACCGTGTCACCAT |
| | CACTTGCCGGGCAAGTCAGAGCATTAAGAATCGGTTACGTTGGTACCAGCAGAAACCAGGGA |
| | AAGCCCCTAAGCTCCTGATCTATCGTGCATCCAAGTTGCAAAGTGGGGTCCCATCACGTTTC |
| | AGTGGCAGTGGATCTGGGACAGATTTCACTCTCACCATCAGCAGTCTGCAACCTGAAGATTT |
| | TGCTACGTACTACTGTCAACAGCGGTATCATATTCCTAGGACGTTCGGCCAAGGGACCAAGG |
| | TGGAAATCAAACGG (SEQ ID NO: 215) |
| ABT1-29 | GACATCCAGATGACCCAGTCTCCATCCTCCCTGTCTGCATCTGTAGGAGACCGTGTCACCAT |
| | CACTTGCCGGGCAAGTCAGAGCATTCGTTCTCGTTTATCGTGGTACCAGCAGAAACCAGGGA |
| | AAGCCCCTAAGCTCCTGATCTATAGGGCATCCCAGTTGCAAAGTGGGGTCCCATCACGTTTC |
| | AGTGGCAGTGGATCTGGGACAGATTTCACTCTCACCATCAGCAGTCTGCAACCTGAAGATTT |
| | TGCTACGTACTACTGTCAACAGCGTTTTATTTGGCCTAGGACGTTCGGCCAAGGGACCAAGG |
| | TGGAAATCAAACGG (SEQ ID NO: 216) |
| ABT1-30 | GACATCCAGATGACCCAGTCTCCATCCTCCCTGTCTGCATCTGTAGGAGACCGTGTCACCAT |
| | CACTTGCCGGGCAAGTCAGAGCATTAATAGGGGTTTAAGGTGGTACCAGCAGAAACCAGGGA |
| | AAGCCCCTAAGCTCCTGATCTATCGTGCATCCGTTTTGCAAAGTGGGGTCCCATCACGTTTC |
| | AGTGGCAGTGGATCTGGGACAGATTTCACTCTCACCATCAGCAGTCTGCAACCTGAAGATTT |
| | TGCTACGTACTACTGTCAACAGGTGAGTCGTCGTCCTCGGACGTTCGGCCAAGGGACCAAGG |
| | TGGAAATCAAACGG (SEQ ID NO: 217) |
| ABT1-53 | GACATCCAGATGACCCAGTCTCCATCCACCCTGTCTGCATCTGTAGGAGACCGTGTCACCAT |
| | CACTTGCCGGGCAAGTCAGAGCATTAGGGCTAAGTTACGTTGGTACCAGCAGAAACCAGGGA |
| | AGGCCCCTAAGCTCCTGATCTATAAGGCATCCCGGTTGCAAAGTGGGGTCCCATCACGTTTC |
| | AGTGGCAGTGGATCTGGGACAGATTTCACTCTCACCATCAGCAGTCTGCAACCTGAAGATTT |
| | TGCTACGTACTACTGTCAACAGCGTGGGCTTCTTCCTTTTACGTTCGGCCAAGGGACCAAGG |
| | TAGAAATCAAACGG (SEQ ID NO: 218) |
| ABT1-54 | GACATCCAGATGACCCAGTCTCCATCCTCCCTGTCTGCATCTGTAGGAGACCGTGTCACCAT |
| | CACTTGCCGGGCAAGTCAGAGCATTGGTAGGAAGTTACGGTGGTACCAGCAGAAACCAGGGA |
| | AAGCCCCTAAGCTCCTGATCTATCATGCATCCATTTTGCAAAGTGGGGTCCCATCACGTTTC |
| | AGTGGCAGTGGATCTGGGACAGATTTCACTCTCACCATCAGCAGTCTGCAACCTGAAGATTT |
| | TGCTACGTACTACTGTCAACAGAGGGTTCGTATGCCTTTTACGTTCGGCCAAGGGACCAAGG |
| | TGGAAATCAAACGG (SEQ ID NO: 219) |
| ABT1-56 | GACATCCAGATGACCCAGTCTCCATCCTCCCTGTCTGCATCTGTAGGAGACCGTGTCACCAT |
| | CACTTGCCGGGCAAGTCAGAGCATTAAGACTCGTTTACAGTGGTACCAGCAGAAACGAGGGA |
| | AAGCCCCTAAGCTCCTGATCTATCATGCATCCGTGTTGCAAAGTGGGGTCCCATCACGTTTC |
| | AGTGGCAGTGGATCTGGGACAGATTTCACTCTCACCATCAGCAGTCTACAACCTGAAGATTT |
| | TGCTACGTACTACTGTCAACAGCGGAAGATGCGTCCTCATACGTTCGGCCAAGGGACCAAGG |
| | TGGAAATCAAACGG (SEQ ID NO: 220) |
| ABT1-57 | GACATCCAGATGACCCAGTCTCCATCCTCCCTGTCTGCATCTGTAGGAGACCGTGTCACCAT |
| | CACTTGCCGGGCAAGTCAGAGCATTAAGCGTGAGTTAGCGTGGTACCAGCAGAAACCAGGGA |
| | AAGCCCCTAAGCTCCTGATCTATAAGGCATCCCGGTTGCAAAGTGGGGTCCCATCACGTTTC |
| | AGTGGCAGTGGATCTGGGACAGATTTCACTCTCACCATCAGCAGTCTGCAACCTGAAGATTT |
| | TGCTACGTACTACTGTCAACAGAGGAAGTCGCATCCTCGGACGTTCGGCCAAGGGACCAAGG |
| | TGGAAATCAAACGG (SEQ ID NO: 221) |
| ABT1-59 | GACATCCAGATGACCCAGTCTCCATCCTCCCTGTCTGCATCTGTAGGAGACCGTGTCACCAT |
| | CACTTGCCGGGCAAGTCAGAGCATTGGGCGGCGTTTAGCTTGGTACCAGCAGAAACCAGGGA |
| | AAGCCCCTAAGCTCCTGATCTATTGGGCATCCAAGTTGCAAAGTGGGGTCCCATCACGTTTC |
| | AGTGGCAGTGGATCTGGGACAGATTTCACTCTCACCATCAGCAGTCTGCAACCTGAAGATTT |
| | TGCTACGTACTACTGTCAACAGGGGAATGTGTGGCCTTATACGTTCGGCCAAGGGACCAAGG |
| | TGGAAATCAAACGG (seq id no: 222) |
| ABT1-60 | GACATCCAGATGACCCAGTCTCCATCCTCCCTGTCTGCATCTGTAGGAGACCGTGTCACCAT |
| | CACTTGCCGGGCAAGTCAGAGCATTGGTCGTCGTTTAAAGTGGTACCAGCAGAAACCAGGGA |
| | AAGCCCCTAAGCTCCTGATCTATAAGGCATCCAGGTTGCAAAGTGGGGTCCCATCACGTTTC |
| | AGTGGCAGTGGATCTGGGACAGATTTCACTCTCACCATCAGCAGTCTGCAACCTGAAGATTT |
| | TGCTACGTACTACTGTCAACAGAATAGTCATCATCCTTATACGTTCGGCCAAGGGACCAAGG |
| | TGGAAATCAAACGG (SEQ ID NO: 223) |
| ABT1-61 | GACATCCAGATGACCCAGTCTCCATCCTCCCTGTCTGCATCTGTAGGAGACCGTGTCACCAT |
| | CACTTGCCGGGCAAGTCAGAGCATTGGGCATCGTTTAAGGTGGTACCAGCAGAAACCAGGGA |
| | AAGCCCCTAAGCTCCTGATCTATAAGGCATCCCTGTTGCAAAGTGGGGTCCCATCACGTTTC |
| | AGTGGCAGTGGATCTGGGACAGATTTCACTCTCACCATCAGCAGTCTGCAACCTGAAGATTT |
| | TGCTACGTACTACTGTCAACAGGTGCGTGCGTATCCTCGTACGTTCGGCCAAGGGACCAAGG |
| | TGGAAATCAAACGG (SEQ ID NO: 224) |
| ABT1-62 | GACATCCAGATGACCCAGTCTCCATCCCCCCTGTCTGCATCTGTAGGAGACCGTGTCACCAT |
| | CACTTGCCGGGCAAGTCAGAGCATTCCGTTTTATTTAGGGTGGTACCAGCAGAAACCAGGGA |
| | AAGCCCCTAAGCTCCTGATCTATAGGGCATCCATGTTGCAAAGTGGGGTCCCATCACGTTTC |
| | AGTGGCAGTGGATCTGGGACAGATTTCACTCTCACCATCAGCAGTCTGCAACCTGAAGATTT |
| | TGCTACGTACTACTGTCAACAGATTCTTCAGGCTCCTCCGACGTTCGGCCAAGGGACCAAGG |
| | TGGAAATCAAACGG (seq id no: 225) |
| ABT1-63 | GACATCCAGATGACCCAGTCTCCATCCTCCCTGTCTGCATCTGTAGGAGACCGTGTCACCAT |
| | CACTTGCCGGGCAAGTCAGAGCATTGGTGCGTTTTTAGGTTGGTACCAGCAGAAACCAGGGA |
| | AAGCCCCTAAGCTCCTGATCTATCGGGCATCCCCTTTGCAAAGTGGGGTCCCATCACGTTTC |
| | AGTGGCGGTGGATCTGGGACAGATTTCACTCTCACCATCAGCAGTCTGCAACCTGAAGATTT |
| | TGCTACGTACTACTGTCAACAGCAGCGTGTGGTTCCTGGGACGTTCGGCCAAGGGACCAAGG |
| | TGGAAATCAAACGG (seq id no: 226) |
| ABT1-64 | GACATCCAGATGACCCAGTCTCCATCCTCCCTGTCTGCATCTGTAGGAGACCGTGTCACCAT |
| | CACTTGCCGGGCAAGTCAGAGCATTTCGAAGGTGTTAGGTTGGTACCAGCAGAAACCAGGGA |
| | AAGCCCCTAAGCTCCTGATCTATAAGGCATCCATTTTGCAAAGTGGGGTCCCATCACGTCTC |
| | AGTGGCAGTGGATCTGGGACAGATTTCACTCTCACCATCAGCAGTCTGCAACCTGAAGATTT |
| | TGCTACGTACTACTGTCAACAGGCGCTTGATTTTCCTTATACGTTCGGCCAAGGGACCAAGG |
| | TGGAAATCAAACGG (SEQ ID NO: 227) |
| ABT1-65 | GACATCCAGATGACCCAGTCTCCATCCTCCCTGTCTGCATCTGTAGGAGACCGTGTCACCAT |
| | CACTTGCCGGGCAAGTCAGAGCATTAGCAGCTATTTAAATTGGTACCAGCAGAAACCAGGGA |
| | AAGCCCCTAAGCTCCTGATCTATGCTGCATCCAGTTTGCAAAGTGGGGTCCCATCACGTTTC |
| | AGTGGCAGTGGATCTGGGACAGATTTCACTCTCACCATCAGCAGTCTGCAACCTGAAGATTT |
| | TGCTACGTACTACTGTCAACAGGATTATGATTTTCCTATTACGTTCGGCCAAGGGACCAAGG |
| | TGGAAATCAAACGG (SEQ ID NO: 228) |
| ABT1-66 | GACATCCAGATGACCCAGTCTCCATCCTCCCTGTCTGCATCTGTAGGAGACCGTGTCACCAT |
| | CACTTGCCGGGCAAGTCAGAGCATTATGCGGAAGTTAAGGTGGTACCAGCAGAAACCAGGGA |
| | AAGCCCCTAAGCTCCTGATCTATAAGGCATCCAAGTTGCAAAGTGGGGTCCCATCACGTTTC |
| | AGTGGCAGTGGATCTGGGACAGATTTCACTCTCACCATCAGCAGTCTGCAACCTGAAGATTT |
| | TGCTACGTACTACTGTCAACAGAGTCATCGGAGGCCTTATACGTTCGGCCAAGGGACCAAGG |
| | TGGAAATCAAACGG (SEQ ID NO: 229) |
| ABT1-67 | GACATCCAGATGACCCAGTCTCCATCCTCCCTGTCTGCATCTGTAGGAGACCGTGTCACCAT |
| | CACTTGCCGGGCAAGTCAGAGCATTCATCGTTCTTTACGTTGGTACCAGCAGAAACCAGGGA |
| | AAGCCCCTAAGCTCCTGATCTATCATGCATCCCATTTGCAAAGTGGGGTCCCATCACGTTTC |
| | AGTGGCAGTGGATCTGGGACAGATTTCACTCTCACCATCAGCAGTCTGCAACCTGAAGATTT |
| | TGCTACGTACTACTGTCAACAGTATAAGCGGCGTCCTTCTACGTTCGGCCAAGGGACCAAGG |
| | TGGAAATCAAACGG (SEQ ID NO: 230) |
| ABT1-68 | GACATCCAGATGACCCAGTCTCCATCCTCCCTGTCTGCATCTGTAGGAGACCGTGTCACCAT |
| | CACTTGCCGGGCAAGTCAGAGCATTCATAAGCAGTTAACGTGGTACCAGCAGAAACCAGGGA |
| | AAGCCCCTAAGCTCCTGATCTATAGGGCATCCCGGTTGCAAAGTGGGGTCCCATCACGTTTC |
| | AGTGGCAGTGGATCTGGGACAGATTTCACTCTCACCATCAGCAGTCTGCAACCTGAAGATTT |
| | TGCTACGTACTACTGTCAACAGTATCATCATAGGCCTTCAACGTTCGGCCAAGGGACCAAGG |
| | TGGAAATCAAACGG (SEQ ID NO: 231) |
| ABT1-82 | GACATCCAGATGACCCAGTCTCCATCCTCCCTGTCTGCATCTGTAGGAGACCGTGTCACCAT |
| | CACTTGCCGGGCAAGTCAGAGCATTGGGAAGTCGTTACGGTGGTACCAGCAGAAACCAGGGA |
| | AAGCCCCTAAGCTCCTGATCTATCGTGCATCCTATTTGCAAAGTGGGGTCCCATCACGTTTC |
| | AGTGGCAGTGGATCTGGGACAGATTTCACTCTCACCATCAGCAGTCTGCAACCTGAAGATTT |
| | TGCTACGTACTACTGTCAACAGGTTATGTTTGGGCCTCGTACGTTCGGCCAAGGGACCAAGG |
| | TGGAAATCAAACGG (SEQ ID NO: 232) |
| ABT1-95 | GACATCCAGATGACCCAGTCTCCATCCTCCCTGTCTGCATCTGTAGGAGACCGTGTCACCAT |
| | CACTTGCCGGGCAAGTCAGCCGATTCATGGGAATTTACGTTGGTATCAGCAGAAACCAGGGA |
| | AAGCCCCTAAGCTCCTGATCTATAATATTTCCAATTTGCAAAGTGGGGTCCCATCACGTTTC |
| | AGTGGCAGTGGATCTGGGACAGATTTCACTCTCACCATCAGCAGTCTGCAACCTGAAGATTT |
| | TGCTACGTACTACTGTCAACAGGGGTATCGTTGGCCTGTTACGTTCGGCCAAGGGACCAAGG |
| | TGGAAATCAAACGG (SEQ ID NO: 233) |
| ABT1-95-3 | GACATCCAGATGACCCAGTCTCCATCCTCCCTGTCTGCATCTGTAGGAGACCGTGTCACCAT |
| | CACTTGCCGGGCAAGTCAGCCGATTCATGGGAATTTACGTTGGTATCAGCAGAAACCAGGGA |
| | AAGCCCCTAAGCTCCTGATCTATTCTTCGTCCTATTTGCAAAGTGGGGTCCCATCACGTTTC |
| | AGTGGCAGTGGATCTGGGACAGATTTCACTCTCACCATCAGCAGTCTGCAACCTGAAGATTT |
| | TGCTACGTACCACTGTCAACAGGGGTATCGTTGGCCTGTTACGTTCGGCCAAGGGACCAAGG |
| | TGGAAATCAAACGG (SEQ ID NO: 234) |
| ABT1-95-4 | GACATCCAGATGACCCAGTCTCCATCCTCCCTGTCTGCATCTGTAGGAGACCGTGTCACCAT |
| | CACTTGCCGGGCAAGTCAGCCGATTGTGCGCAACTTAAGGTGGTATCAGCAGAAACCAGGGA |
| | AAGCCCCTAAGCTCCTGATCTATTCTTCGTCCTATTTGCAAAGTGGGGTCCCATCACGTTTC |
| | AGTGGTAGTGGATCCGGGACAGATTTCACTCTCACCATCAGCAGTCTGCAACCTGAAGATTT |
| | TGCTACGTACCACTGTCAACAGGGGTATCGTTGGCCTGTTACGTTCGGCCAAGGGACCAAGG |
| | TGGAAATCAAACGG (SEQ ID NO: 235) |
| ABT1-95-6 | GACATCCAGATGACCCAGTCACCATCCTCTCTGTCTGCATCTGTAGGAGACCGTGTCACCAT |
| | CACTTGCCGGGCAAGTCAGCCGATTCAGGGGAATTTACGTTGGTATCAGCAGAAACCAGGGA |
| | AGGCCCCTAAGCTCCTGATCTATTCTTCGTCCTATTTGGAAAGTGGGGTCCCATCACGTTTC |
| | AGTGGTAGTGGATCCGGGACAGATTTCACTCTCACCATCAGCAGTCTGCAACCTGAAGATTT |
| | TGCTACGTACCACTGTCAACAGGGGTATCGTTGGCCTGTTACGTTCGGCCAAGGGACCAAGG |
| | TGGAAATCAAACGG (SEQ ID NO: 236) |
| ABT1-95-8 | GACATCCAGATGACCCAGTCACCATCCTCTCTGTCTGCATCTGTAGGAGACCGTGTCACCAT |
| | CACTTGCCGGGCAAGTCAGCCGATTCAGGGGAATTTACGTTGGTATCAGCAGAAACCAGGGA |
| | AAGCCCCTAAGCTCCTGATCTATTCTTCGTCCTATTTGGAAAGAGGGGTCCCATCACGTTTC |
| | AGTGGTAGTGGATCCGGGACAGATTTCACTCTCACCATCAGCAGTCTGCAACCTGAAGATTT |
| | TGCTACGTACCACTGTCAACAGGGGTATCGTTGGCCTGTTACGTTCGGCCAAGGGACCAAGG |
| | TGGAAATCAAACGG (SEQ ID NO: 237) |
| ABT1-95-9 | GACATCCAGATGACCCAGTCACCATCCTCTCTGTCTGCATCTGTAGGAGACCGTGTCACCAT |
| | CACTTGCCGGGCAAGTCAGCCGATTCAGGGGAATTTACGTTGGTATCAGCAGAAACCAGGGA |
| | AAGCCCCTAAGCTCCTGATCTATTCTTCGTCCTATTTGGAAAGAGGGGTCCCATCACGTTTC |
| | AGTGGTAGTGGATCCGGGACAGATTTCACTCTCACCATCAGCAGTCTGCATCCTGAAGATTT |
| | TGCTACGTACCACTGTCAACAGGGGTATCGTTGGCCTGTTACGTTCGGCCAAGGGACCAAGG |
| | TGGAAATCAAACGG (SEQ ID NO: 238) |
| ABT1-95- | GACATCCAGATGACCCAGTCACCATCCTCTCTGTCTGCATCTGTAGGAGACCGTGTCACCAT |
| 10 | CACTTGCCGGGCAAGTCAGCCGATTCAGGGGAATTTACGTTGGTATCAGCAGAAACCAGGGA |
| | AAGCCCCTAAGCTCCTGATCTATTCTTCGTCCTATTTGGAAAGAGGGGTCCCATCACGTTTC |
| | AGTGGTAGTGGATCCGGGACAGATTTCACTCTCACCATCAGCAGTCTGCATCCTGAAGATCT |
| | TGCTACGTACCACTGTCAACAGGGGTATCGTTGGCCTGTTACGTTCGGCCAAGGGACCAAGG |
| | TGGAAATCAAACGG (SEQ ID NO: 239) |
| ABT1-95- | GACATCCAGATGACCCAGTCACCATCCTCTCTGTCTGCATCTGTAGGAGACCGTGTCACCAT |
| 11 | CACTTGCCGGGCAAGTCAGCCGATTCAGGGGAATTTACGTTGGTATCAGCAGAAACCAGGGA |
| | TAGCCCCTAAGCTCCTGATCTATTCTTCGTCCTATTTGGAAAGAGGGGTCCCATCACGTTTC |
| | AGTGGTAGTGGATCCGGGACAGATTTCACTCTCACCATCAGCAGTCTGCATCCTGAAGATCT |
| | TGCTACGTACCACTGTCAACAGGGGTATCGTTGGCCTGTTACGTTCGGCCAAGGGACCAAGG |
| | TGGAAATCAAACGG (SEQ ID NO: 240) |
| ABT1-95- | GACATCCAGATGACCCAGTCTCCATCCTCCCTGTCTGCATCTGTAGGAGACCGTGTCACCAT |
| 12 | CACTTGCCGGGCAAGTCAGCCGATTCATGGGAATTTACGTTGGTATCAGCAGAAACCAGGGA |
| | AAGCCCCTAAGCTCCTGATCTATTCTTCGTCCTATTTGGAAAGTTGGGTCCCATCACGTTTC |
| | AGTGGTAGTGGATCCGGGACAGATTTCACTCTCACCATCAGCAGTCTGCAACCTGAAGATTT |
| | TGCTACGTACCACTGTCAACAGGGGTATCGTTGGCCTGTTACGTTCGGCCAAGGGACCAAGG |
| | TGGAAATCAAACGG (SEQ ID NO: 241) |
| ABT1-95- | GACATCCAGATGACCCAGTCTCCATCCTCCCTGTCTGCATCTGTAGGAGACCGTGTCACCAT |
| 13 | CACTTGCCGGGCAAGTCAGCCGATTGTGCGCAACTTAAGGTGGTATCAGCAGAAACCAGGGA |
| | AAGCCCCTAAGCTCCTGATCTATTCTTCGTCCTATTTGGAAAGAGGGGTCCCATCACGTTTC |
| | AGTGGTAGTGGATCCGGGACAGATTTCACTCTCACCATCAGCAGTCTGCAACCTGAAGATTT |
| | TGCTACGTACCACTGTCAACAGGGGTATCGTTGGCCTGTTACGTTCGGCCAAGGGACCAAGG |
| | TGGAAATCAAACGG (SEQ ID NO: 242) |
| ABT1-95- | GACATCCAGATGACCCAGTCTCCATCCTCCCTGTCTGCATCTGTAGGAGACCGTGTCACCAT |
| 14 | CACTTGCCGGGCAAGTCAGCCGATTGTGAAGAACTTAAGGTGGTATCAGCAGAAACCAGGGA |
| | AAGCCCCTAAGCTCCTGATCTATTCTTCGTCCTATTTGGAAAGAGGGGTCCCATCACGTTTC |
| | AGTGGTAGTGGATCCGGGACAGATTTCACTCTCACCATCAGCAGTCTGCAACCTGAAGATTT |
| | TGCTACGTACCACTGTCAACAGGGGTATCGTTGGCCTGTTACGTTCGGCCAAGGGACCAAGG |
| | TGGAAATCAAACGG (SEQ ID NO: 243) |
| ABT1-95- | GACATCCAGATGACCCAGTCTCCATCCTCCCTGTCTGCATCTGTAGGAGACCGTGTCACCAT |
| 15 | CACTTGCCGGGCAAGTCAGCCGATTGTGCGGAACTTAAGGTGGTATCAGCAGAAACCAGGGA |
| | AAGCCCCTAAGCTCCTGATCTATTCTTCGTCCTATTTGGAGCCCGGGGTCCCATCACGTTTC |
| | AGTGGTAGTGGATCCGGGACAGATTTCACTCTCACCATCAGCAGTCTGCAACCCGAAGATTT |
| | TGCTACGTACCACTGTCAACAGGGGTATCGTTGGCCTGTTACGTTCGGCCAAGGGACCAAGG |
| | TGGAAATCAAACGG (SEQ ID NO: 244) |
| ABT1-95- | GACATCCAGATGACCCAGTCTCCATCCTCCCTGTCTGCATCTGTAGGAGACCGTGTCACCAT |
| 21 | CACTTGCCGGGCAAGTCAGCCGATTGTGCGGAACTTAAGGTGGTATCAGCAGAAACCAGGGA |
| | AAGCCCCTAAGCTCCTGATCTATTCTTCGTCCTATTTGGAGCCCGGGGTCCCATCACGTTTC |
| | AGTGGTAGTGGATCCGGGACAGATTTCACTCTCACCATCAGCAGTCTGCAACCCGAAGATTT |
| | TGCTACGTACTACTGTCAACAGGGGTATCGTTGGCCTGTTACGTTCGGCCAAGGGACCAAGG |
| | TGGAAATCAAACGG (SEQ ID NO: 245) |
| ABT1-95- | GACATCCAGATGACCCAGTCTCCATCCTCCCTGTCTGCATCTGTAGGAGACCGTGTCACCAT |
| 22 | CACTTGCCGGGCAAGTCAGCCGATTGTGCGGAACTTAAGGTGGTATCAGCAGAAACCAGGGA |
| | AAGCCCCTAAGCTCCTGATCTATTCTTCGTCCTATTTGGAGCCCGGGGTCCCATCACGTTTC |
| | AGTGGTAGTGGATCCGGGACAGATTTCACTCTCACCATCAGCAGTCTGCAACCCGAAGATTT |
| | TGCTACGTACTACTGTCAACAGGGGTATCACTGGCCTGTTACGTTCGGCCAAGGGACCAAGG |
| | TGGAAATCAAACGG (SEQ ID NO: 246) |
| ABT1-95- | GACATCCAGATGACCCAGTCTCCATCCTCCCTGTCTGCATCTGTAGGAGACCGTGTCACCAT |
| 23 | CACTTGCCGGGCAAGTCAGCCGACTGTGCGGAACCTAAGGTGGTATCAGCAGAAACCAGGGA |
| | AAGCCCCTAAGCTCCTGATCTATTCTTCGTCCTATTTGGAGCCCGGGGTCCCATCACGTTTC |
| | AGTGGTAGTGGATCCGGGACAGATTTCACTCTCACCATCAGCAGTCTGCAACCCGAAGATTT |
| | TGCTACGTACTACTGTCAACAGGGGTACCGTTGGCCTGTTACGTTCGGCCAAGGGACCAAGG |
| | TGGAAATCAAACGG (SEQ ID NO: 247) |
| ABT1-95- | GACATCCAGATGACCCAGTCTCCATCCTCCCTGTCTGCATCTGTAGGAGACCGTGTCACCAT |
| 24 | CACTTGCCGGGCAAGTCAGCCGATTGTGCGGAACTTAAGGTGGTATCAGCAGAAACCAGGGA |
| | AAGCCCCTAAGCTCCTGATCTATTCTTCGTCCTATTTGGAGCCCGGGGTCCCATCACGTTTC |
| | AGTGGTAGTGGATCCGGGACAGATTTCACTCTCACCATCAGCAGTCTGCAACCCGAAGATTT |
| | TGCTACGTACTACTGTTGCCAGGGGTATCGTTGGCCTGTTACGTTCGGCCAAGGGACCAAGG |
| | TGGAAATCAAACGG (SEQ ID NO: 248) |
| ABT1-95- | GACATCCAGATGACCCAGTCTCCATCCTCCCTGTCTGCATCTGTAGGAGACCGTGTCACCAT |
| 25 | CACTTGCCGGGCAAGTCAGCCGATTGTGCGGAACTTAAGGTGGTATCAGCAGAAACCAGGGA |
| | AAGCCCCTAAGCTCCTGATCTATTCTTCGTCCTATTTGGAGCCCGGGGTCCCATCACGTTTC |
| | AGTGGTAGTGGATCCGGGACAGATTTCACTCTCACCATCAGCAGTCTGCAACCCGAAGATTT |
| | TGCTACGTACTACTGTGACCAGGGGTATCGTTGGCCTGTTACGTTCGGCCAAGGGACCAAGG |
| | TGGAAATCAAACGG (SEQ ID NO: 249) |
| ABT1-95- | GACATCCAGATGACCCAGTCTCCATCCTCCCTGTCTGCATCTGTAGGAGACCGTGTCACCAT |
| 26 | CACTTGCCGGGCAAGTCAGCCGATTGTGCGGAACTTAAGGTGGTATCAGCAGAAACCAGGGA |
| | AAGCCCCTAAGCTCCTGATCTATTCTTCGTCCTATTTGGAGCCCGGGGTCCCATCACGTTTC |
| | AGTGGTAGTGGATCCGGGACAGATTTCACTCTCACCATCAGCAGTCTGCAACCCGAAGATTT |
| | TGCTACGTACTACTGTGGCCAGGGGTATCGTTGGCCTGTTACGTTCGGCCAAGGGACCAAGG |
| | TGGAAATCAAACGG (SEQ ID NO: 250) |
| ABT1-95- | GACATCCAGATGACCCAGTCTCCATCCTCCCTGTCTGCATCTGTAGGAGACCGTGTCACCAT |
| 27 | CACTTGCCGGGCAAGTCAGCCGATTGTGCGGAACTTAAGGTGGTATCAGCAGAAACCAAGGA |
| | AAGCCCCTAAGCTCCTGATCTATTCTTCGTCCTATTTGGAGCCCGGGGTCCCATCACGTTTC |
| | AGTGGTAGTGGATCCGGGACAGATTTCACTCTCACCATCAGCAGTCTGCAACCCGAAGATTT |
| | TGCTACGTACTACTGTGCGCAGGGGTATCGTTGGCCTGTTACGTTCGGCCAAGGGACCAAGG |
| | TGGAAATCAAACGG (SEQ ID NO: 251) |
| ABT1-95- | GACATCCAGATGACCCAGTCTCCATCCTCCCTGTCTGCATCTGTAGGAGACCGTGTCACCAT |
| 28 | CACTTGCCGGGCAAGTCAGCCGATTGTGCGGAACTTAAGGTGGTATCAGCAGAAACCAGGGA |
| | AAGCCCCTAAGCTCCTGATCTATTCTTCGTCCTATTTGGAGCCCGGGGTCCCATCACGTTTC |
| | AGTGGTAGTGGATCCGGGACAGATTTCACTCTCACCATCAGCAGTCTGCAACCCGAAGATTT |
| | TGCTACGTACTACTGTCAACAGGGGTATGGCTGGCCTGTTACGTTCGGCCAAGGGACCAAGG |
| | TGGAAATCAAACGG (SEQ ID NO: 252) |
| ABT1-95- | GACATCCAGATGACCCAGTCTCCATCCTCCCTGTCTGCATCTGTAGGAGACCGTGTCACCAT |
| 29 | CACTTGCCGGGCAAGTCAGCCGATTGTGCGGAACTTAAGGTGGTATCAGCAGAAACCAGGGA |
| | AAGCCCCTAAGCTCCTGATCTATTCTTCGTCCTATTTGGAGCCCGGGGTCCCATCACGTTTC |
| | AGTGGTAGTGGATCCGGGACAGATTTCACTCTCACCATCAGCAGTCTGCAACCCGAAGATTT |
| | TGCTACGTACTACTGTCAACAGGGGTATCAGTGGCCTGTTACGTTCGGCCAAGGGACCAAGG |
| | TGGAAATCAAACGG (SEQ ID NO: 253) |
| ABT1-95- | GACATCCAGATGACCCAGTCTCCATCCTCCCTGTCTGCATCTGTAGGAGACCGTGTCACCAT |
| 30 | CACTTGCCGGGCAAGTCAGCCGATTGTGCGGAACTTAAGGTGGTATCAGCAGAAACCAGGGA |
| | AAGCCCCTAAGCTCCTGATCTATTCTTCGTCCTATTTGGAGCCCGGGGTCCCATCACGTTTC |
| | AGTGGTAGTGGATCCGGGACAGATTTCACTCTCACCATCAGCAGTCTGCAACCCGAAGATTT |
| | TGCTACGTACTACTGTCAACAGTCCTATCGTTGGCCTGTTACGTTCGGCCAAGGGACCAAGG |
| | TGGAAATCAAACGG (SEQ ID NO: 254) |
| ABT1-95- | GACATCCAGATGACCCAGTCTCCATCCTCCCTGTCTGCATCTGTAGGAGACCGTGTCACCAT |
| 31 | CACTTGCCGGGCAAGTCAGCCGATTGTGCGGAACTTAAGGTGGTATCAGCAGAAACCAGGGA |
| | AAGCCCCTAAGCTCCTGATCTATTCTTCGTCCTATTTGGAGCCCGGGGTCCCATCACGTTTC |
| | AGTGGTAGTGGATCCGGGACAGATTTCACTCTCACCATCAGCAGTCTGCAACCCGAAGATTT |
| | TGCTACGTACTACTGTCAACAGGGGTATCTGTGGCCTGTTACGTTCGGCCAAGGGACCAAGG |
| | TGGAAATCAAACGG (SEQ ID NO: 255) |
| ABT1-95- | GACATCCAGATGACCCAGTCTCCATCCTCCCTGTCTGCATCTGTAGGAGACCGTGTCACCAT |
| 32 | CACTTGCCGGGCAAGTCAGCCGATTGTGCGGAACTTAAGGTGGTATCAGCAGAAACCAGGGA |
| | AAGCCCCTAAGCTCCTGATCTATTCTTCGTCCTATTTGGAGCCCGGGGTCCCATCACGTTTC |
| | AGTGGTAGTGGATCCGGGACAGATTTCACTCTCACCATCAGCAGTCTGCAACCCGAAGATTT |
| | TGCTACGTACTACTGTCAACAGGGGTATTCCTGGCCTGTTACGTTCGGCCAAGGGACCAAGG |
| | TGGAAATCAAACGG (SEQ ID NO: 256) |
| ABT1-95- | GACATCCAGATGACCCAGTCTCCATCCTCCCTGTCTGCATCTGTAGGAGACCGTGTCACCAT |
| 33 | CACTTGCCGGGCAAGTCAGCCGATTGTGCGGAACTTAAGGTGGTATCAGCAGAAACCAGGGA |
| | AAGCCCCTAAGCTCCTGATCTATTCTTCGTCCTATTTGGAGCCCGGGGTCCCATCACGTTTC |
| | AGTGGTAGTGGATCCGGGACAGATTTCACTCTCACCATCAGCAGTCTGCAACCCGAAGATTT |
| | TGCTACGTACTACTGTCGCCAGGGGTATCGTTGGCCTGTTACGTTCGGCCAAGGGACCAAGG |
| | TGGAAATCAAACGG (SEQ ID NO: 257) |
| ABT1-95- | GACATCCAGATGACCCAGTCTCCATCCTCCCTGTCTGCATCTGTAGGAGACCGTGTCACCAT |
| 34 | CACTTGCCGGGCAAGTGCGCCGATTGTGCGGAACTTAAGGTGGTATCAGCAGAAACCAGGGA |
| | AAGCCCCTAAGCTCCTGATCTATTCTTCGTCCTATTTGGAGCCCGGGGTCCCATCACGTTTC |
| | AGTGGTAGTGGATCCGGGACAGATTTCACTCTCACCATCAGCAGTCTGCAACCCGAAGATTT |
| | TGCTACGTACCACTGTCAACAGGGGTATCGTTGGCCTGTTACGTTCGGCCAAGGGACCAAGG |
| | TGGAAATCAAACGG (SEQ ID NO: 258) |
| ABT1-95- | GACATCCAGATGACCCAGTCTCCATCCTCCCTGTCTGCATCTGTAGGAGACCGTGTCACCAT |
| 35 | CACTTGCCGGGCAAGTGGGCCGATTGTGCGGAACTTAAGGTGGTATCAGCAGAAACCAGGAA |
| | AAGCCCCTAAGCTCCTGATCTATTCTTCGTCCTATTTGGAGCCCGGGGTCCCATCACGTTTC |
| | AGTGGTAGTGGATCCGGGACAGATTTCACTCTCACCATCAGCAGTCTGCAACCCGAAGATTT |
| | TGCTACGTACCACTGTCAACAGGGGTATCGTTGGCCTGTTACGTTCGGCCAAGGGACCAAGG |
| | TGGAAATCAAACGG (SEQ ID NO: 259) |
| ABT1-95- | GACATCCAGATGACCCAGTCTCCATCCTCCCTGTCTGCATCTGTAGGAGACCGTGTCGCCAT |
| 36 | CACTTGCCGGGCAAGTCAGCCGATTGTGCGGAACTTAAGGTGGTATCAGCAGAAACCAGGGA |
| | AAGCCCCTAAGCTCCTGATCTATTCTTCGTCCTATTTGGAGCCCGGGGTCCCATCACGTTTC |
| | AGTGGTAGTGGATCCGGGACAGATTTCACTCTCACCATCAGCAGTCTGCAACCCGAAGATTT |
| | TGCTACGTACCACTGTCAACAGGGGTATCGTTGGCCTGTTACGTTCGGCCAAGGGACCAAGG |
| | TGGAAATCAAACGG (SEQ ID NO: 260) |
| ABT1-95- | GACATCCAGATGACCCAGTCTCCATCCTCCCTGTCTGCATCTGTAGGAGACCGTGTCACCAT |
| 37 | CACTTGCCGGGCAAGTCAGCCGATTGTGCGGAACTTAAGGTGGTATCAGCAGAAACCAGGGA |
| | AAGCCCCTAAGCTCCTGATCTATTCTTCGTCCTATTTGGAGCCCGGGGTCCCATCACGTTTC |
| | AGTGGTAGTGGATCCGGGACAGATTTCACTCTCACCATCAGCAGTCTGCAACCCGAAGATTT |
| | TGCTACGTACCACTGTCAACAGGGGTATCGTTGGCCTGTTACGTTCGGCCAAGGGACCAAGG |
| | TGGAAATCAAACGG (SEQ ID NO: 261) |
| ABT1-95- | GACATCCAGATGACCCAGTCTCCATCCTCCCTGCCTGCATCTGTAGGAGACCGTGTCACCAT |
| 38 | CACTTGCCGGGCAAGTCAGCCGATTGTGCGGAACTTAAGGTGGTATCAGCAGAAACCAGGGA |
| | AAGCCCCCAAGCTCCTGATCTATTCTTCGTCCTATTTGGAGCCCGGGGTCCCATCACGTTTC |
| | AGTGGTAGTGGATCCGGGACAGATTTCACTCTCACCATCAGCAGTCTGCAACCCGAAGATTT |
| | TGCTACGTACCACTGTCAACAGGGGTATCGTTGGCCTGTTACGTTCGGCCAAGGGACCAAGG |
| | TGGAAATCAAACGG (SEQ ID NO: 262) |
| ABT1-95- | GACATCCAGATGACCCAGTCTCCATCCTCCCTGTCTGCATCTGTAGGAGACCGTGTCACCAT |
| 39 | CACTTGCCGGGCAAGTCAGCCGATTGTGCGGAACTTAAGGTGGTATCAGCAGAAACCAGGGA |
| | AAGCCCCTAAGCTCCTGATCTATTCTTCGTCCTATTTGGAGCCCGGGGTCCCATCACGTTTC |
| | AGTGGTAGTGGATCCGGGACAGATTTCACTCTCACCATCAGCGGTCTGCAACCCGAAGATTT |
| | TGCTACGTACCACTGTCAACAGGGGTATCGTTGGCCTGTTACGTTCGGCCAAGGGACCAAGG |
| | TGGAAATCAAACGG (SEQ ID NO: 263) |
| ABT1-95- | GACATCCAGATGACCCAGTCTCCATCCTCCCTGTCTGCATCTGTAGGAGACCGTGTCACCAT |
| 40 | CACTTGCCGGGCAAGTCCCCCGATTGTGCGGAACTTAAGGTGGTATCAGCAGAAACCAGGGA |
| | AAGCCCCTAAGCTCCTGATCTATTCTTCGTCCTATTTGGAGCCCGGGGTCCCATCACGTTTC |
| | AGTGGTAGTGGATCCGGGACAGATTTCACTCTCACCATCAGCAGTCTGCAACCCGAAGATTT |
| | TGCTACGTACCACTGTCAACAGGGGTATCGTTGGCCTGTTACGTTCGGCCAAGGGACCAAGG |
| | TGGAAATCAAACGG (SEQ ID NO: 264) |
| ABT1-95- | GACATCCAGATGACCCAGTCTCCATCCTCCCTGTCTGCATCTGTAGGAGACCGTGTCACCAT |
| 41 | CACTTGCCGGGCAAGTTACCCGATTGTGCGGAACTTAAGGTGGTATCAGCAGAAACCAGGGA |
| | AAGCCCCTAAGCTCCTGATCTATTCTTCGTCCTATTTGGAGCCCGGGGTCCCATCACGTTTC |
| | AGTGGTAGTGGATCCGGGACAGATTTCACTCTCACCATCAGCAGTCTGCAACCCGAAGATTT |
| | TGCTACGTACCACTGTCAACAGGGGTATCGTTGGCCTGTTACGTTCGGCCAAGGGACCAAGG |
| | TGGAAATCAAACGG (SEQ ID NO: 265) |
| ABT1-95- | GACATCCAGATGACCCAGTCTCCATCCTCCCTGTCTGCATCTGTAGGAGACCGTGTCACCAT |
| 42 | CACTTGCCGGGCAAGTTTCCCGATTGTGCGGAACTTAAGGTGGTATCAGCAGAAACCAGGGA |
| | AAGCCCCTAAGCTCCTGATCTATTCTTCGTCCTATTTGGAGCCCGGGGTCCCATCACGTTTC |
| | AGTGGTAGTGGATCCGGGACAGATTTCACTCTCACCATCAGCAGTCTGCAACCCGAAGATTT |
| | TGCCACGTACCACTGTCAACAGGGGTATCGTTGGCCTGTTACGTTCGGCCAAGGGACCAAGG |
| | TGGAAATCAAACGG (SEQ ID NO: 266) |
| ABT1-95- | GACATCCAGATGACCCAGTCTCCATCCTCCCTGTCTGCATCTGTAGGAGACCGTGTCACCAT |
| 43 | CACTTGCCGGGCAAGTCTCCCGATTGTGCGGAACTTAAGGTGGTATCAGCAGAAACCAGGGA |
| | AAGCCCCTAAGCTCCTGATCTATTCTTCGTCCTATTTGGAGCCCGGGGTCCCATCACGTTTC |
| | AGTGGTAGTGGATCCGGGACAGATTTCACTCTCACCATCAGCAGTCTGCAACCCGAAGATTT |
| | TGCTACGTACCACTGTCAACAGGGGTATCGTTGGCCTGTTACGTTCGGCCAAGGGACCAAGG |
| | TGGAAATCAAACGG (SEQ ID NO: 267) |
| ABT1-95- | GACATCCAGATGACCCAGTCTCCATCCTCCCTGTCTGCATCTGTAGGAGACCGTGTCACCAT |
| 44 | TACTTGCCGGGCAAGTTCCCCGATTGTGCGGAACTTAAGGTGGTATCAGCAGAAACCAGGGA |
| | AAGCCCCTAAGCTCCTGATCTATTCTTCGTCCTATTTGGAGCCCGGGGTCCCATCACGTTTC |
| | AGTGGTAGTGGATCCGGGACAGATTTCACTCTCACCATCAGCAGTCTGCAACCCGAAGATTT |
| | TGCTACGTACCACTGTCAACAGGGGTATCGTTGGCCTGTTACGTTCGGCCAAGGGACCAAGG |
| | TGGAAATCAAACGG (SEQ ID NO: 268) |
| ABT1-95- | GACATCCAGATGACCCAGTCTCCATCCTCCCTGTCTGCATCTGTAGGAGACCGTGTCACCAT |
| 45 | CACTTGCCGGGCAAGTCCCCCGATTGTGCGGAACTTAAGGTGGTATCAGCAGAAACCAGGGA |
| | AAGCCCCTAAGCTCCTGATCTATTCTTCGTCCTATTTGGAGCCCGGGGTCCCATCACGTTTC |
| | AGTGGTAGTGGATCCGGGACAAATTTCACTCTCACCATCAGCAGTCTGCAACCCGAAGATTT |
| | TGCTACGTACCACTGTCAACAGGGGTATCGTTGGCCTGTTACGTTCGGCCAAGGGACCAAGG |
| | TGGAAATCAAACGG (SEQ ID NO: 269) |
| ABT1-95- | GACATCCAGATGACCCAGTCTCCATCCTCCCTGTCTGCATCTGTAGGAGACCGTGTCACCAT |
| 46 | CACTTGCCGGGCAAGTTCGCCGATTGTGCAGAACTTAAGGTGGTATCAGCAGAAACCAGGGA |
| | AAGCCCCTAAGCTCCTGATCTATTCTTCGTCCTATTTGGAGCCCGGGGTCCCATCACGTTTC |
| | AGTGGTAGTGGATCCGGGACAGATTTCACTCTCACCATCAGCAGTCTGCAACCCGAAGATTT |
| | TGCTACGTACCACTGTCAACAGGGGTATCGTTGGCCTGTTACGTTCGGCCAAGGGACCAAGG |
| | TGGAAATCAAACGG (SEQ ID NO: 270) |
| ABT1-95- | GACATCCAGATGACCCAGTCTCCATCCTCCCTGTCTGCATCTGTAGGAGACCGTGTCACCAT |
| 47 | CACTTGCCGGGCAAGTATGCCGATTGTGCGGAACTTAAGGTGGTATCAGCAGAAACCAGGGA |
| | AAGCCCCTAAGCTCCTGATCTATTCTTCGTCCTATTTGGAGCCCGGGGTCCCATCACGTTTC |
| | AGTGGTAGTGGATCCGGGACAGATTTCACTCTCACCATCAGCAGTCTGCAACCCGAAGATTT |
| | TGCTACGTACCACTGTCAACAGGGGTATCGTTGGCCTGTTACGTTCGGCCAAGGGACCAAGG |
| | TGGAAATCAAACGG (SEQ ID NO: 271) |
| ABT1-95- | GACATCCAGATGACCCAGTCTCCATCCTCCCTGTCTGCATCTGTAGGAGACCGTGTCACCAT |
| 48 | CACTTGCCGGGCAAGTCAGCCGATTGTGCGGAACTTAAGGTGGTATCAGCAGAAACCAGGGA |
| | AAGCCCCTAAGCTCCTGATCTATTCTTCGTCCTATTTGGAGCCCGGGGTCCCATCACGTTTC |
| | AGTGGTAGTGGATCCGGGACAGATTTCACTCTCACCATCAGCAGTCTGCAACCCGAAGATTT |
| | TGCTACGTACCACTGTCAACAGGGGTATCGTTGGCCTGTTACGTTCGGCCAAGGGACCAAGG |
| | TGGAAATCAAACGG (SEQ ID NO: 272) |
| ABT1-95- | GACATCCAGATGACCCAGTCTCCATCCTCCCTATCTGCATCTGTAGGAGACCGTGTCACCAT |
| 49 | CACTTGCCGGGCAAGTCAGCCGATTGTGCGGAACTTAAGGTGGTATCAGCAGAAACCAGGGA |
| | AAGCCCCTAAGCTCCTGATCTATTCTTCGTCCTATTTGGAGCCCGGGGTCCCATCACGTTTC |
| | AGTGGTAGTGGATCCGGGACAGATTTCACTCTCACCATCAGCAGTCTGCAACCCGAAGATTT |
| | TGCTACGTACCACTGTCAACAGGGGTATCGTTGGCCTGTTACGTTCGGCCAAGGGACCAAGG |
| | TGGAAATCAAACGG (SEQ ID NO: 273) |
| ABT1-95- | GACATCCAGATGACCCAGTCTCCATCCTCCCTGTCTGCATCTGTAGGAGACCGTGTCACCAT |
| 50 | CACTTGCCGGGCAAGTCAGCCGATTCCGCGGAACTTAAGGTGGTATCAGCAGAAACCAGGGA |
| | AAGCCCCTAAGCTCCTGATCTATTCTTCGTCCTATTTGGAGCCCGGGGTCCCATCACGTTTC |
| | AGTGGTAGTGGATCCGGGACAGATTTCACTCTCACCATCAGCAGTCTGCAACCCGAAGATTT |
| | TGCTACGTACCACTGTCAACAGGGGTATCGTTGGCCTGTTACGTTCGGCCAAGGGACCAAGG |
| | TGGAAATCAAACGG (SEQ ID NO: 274) |
| ABT1-95- | GACATCCAGATGACCCAGTCTCCATCCTCCCTGTCTGCATCTGTAGGAGACCGTGTCACCAT |
| 51 | CACTTGCCGGGCAAGTCAGCCGATTATCCGGAACTTAAGGTGGTATCAGCAGAAACCAGGGA |
| | AAGCCCCTAAGCTCCTGATCTATTCTTCGTCCTATTTGGAGCCCGGGGTCCCATCACGTTTC |
| | AGTGGTAGTGGATCCGGGACAGATTTCACTCTCACCATCAGCAGTCTGCAACCCGAAGATTT |
| | TGCTACGTACCACTGTCAACAGGGGTATCGTTGGCCTGTTACGTTCGGCCAAGGGACCAAGG |
| | TGGAAATCAAACGG (SEQ ID NO: 275) |
| ABT1-95- | GACATCCAGATGACCCAGTCTCCATCCTCCCTGTCTGCATCTGTAGGAGACCGTGTCACCAT |
| 52 | CACTTGCCGGGCAAGTCAGCCGATTGTGTCGAACTTAAGGTGGTATCAGCAGAAACCAGGGA |
| | AAGCCCCTAAGCTCCTGATCTATTCTTCGTCCTATTTGGAGCCCGGGGTCCCATCACGTTTC |
| | AGTGGTAGTGGATCCGGGACAGATTTCACTCTCACCATCAGCAGTCTGCAACCCGAAGATTT |
| | TGCTACGTACCACTGTCAACAGGGGTATCGTTGGCCTGTTACGTTCGGCCAAGGGACCAAGG |
| | TGGAAATCAAACGG (SEQ ID NO: 276) |
| ABT1-95- | GACATCCAGATGACCCAGTCTCCATCCTCCCTGTCTGCATCTGTAGGAGACCGTGTCACCAT |
| 53 | CACTTGCCGGGCAAGTCAGCCGATTGTGGCCAACTTAAGGTGGTATCAGCAGAAACCAGGGA |
| | AAGCCCCTAAGCTCCTGATCTATTCTTCGTCCTATTTGGAGCCCGGGGTCCCATCACGTTTC |
| | AGTGGTAGTGGATCCGGGACAGATTTCACTCTCACCATCAGCAGTCTGCAACCCGAAGATTT |
| | TGCTACGTACCACTGTCAACAGGGGTATCGTTGGCCTGTTACGTTCGGCCAAGGGACCAAGG |
| | TGGAAATCAAACGG (SEQ ID NO: 277) |
| ABT1-95- | GACATCCAGATGACCCAGTCTCCATCCTCCCTGTCTGCATCTGTAGGAGACCGTGTCACCAT |
| 54 | CACTTGCCGGGCAAGTCAGCCGATTGTGACCAACTTAAGGTGGTATCAGCAGAAACCAGGGA |
| | AAGCCCCTAAGCTCCTGATCTATTCTTCGTCCTATTTGGAGCCCGGGGTCCCATCACGTTTC |
| | AGTGGTAGTGGATCCGGGACAGATTTCACTCTCACCATCAGCAGTCTGCAACCCGAAGATTT |
| | TGCTACGTACCACTGTCAACAGGGGTATCGTTGGCCTGTTACGTTCGGCCAAGGGACCAAGG |
| | TGGAAATCAAACGG (SEQ ID NO: 278) |
| ABT1-95- | GACATCCAGATGACCCAGTCTCCATCCTCCCTGTCTGCATCTGTAGGAGACCGTGTCACCAT |
| 55 | CACTTGCCGGGCAAGTCAGCCGATTGTGCACAACTTAAGGTGGTATCAGCAGAAACCAGGGA |
| | AAGCCCCTAAGCTCCTGATCTATTCTTCGTCCTATTTGGAGCCCGGGGTCCCATCACGTTTC |
| | AGTGGTAGTGGATCCGGGACAGATTTCACTCTCACCATCAGCAGTCTGCAACCCGAAGATTT |
| | TGCTACGTACCACTGTCAACAGGGGTATCGTTGGCCTGTTACGTTCGGCCAAGGGACCAAGG |
| | TGGAAATCAAACGG (SEQ ID NO: 279) |
| ABT1-95- | GACATCCAGATGACCCAGTCTCCATCCTCCCTGTCTGCATCTGTAGGAGACCGTGTCACCAT |
| 56 | CACTTGCCGGGCAAGTCAGCCGATTGTGCGCAACTTAAGGTGGTATCAGCAGAAACCAGGGA |
| | AAGCCCCTAAGCTCCTGATCTATTCTTCGTCCTATTTGGAGCCCGGGGTCCCATCACGTTTC |
| | AGTGGTAGTGGATCCGGGACAGATTTCACTCTCACCATCAGCAGTCTGCAACCCGAAGATTT |
| | TGCTACGTACCACTGTCAACAGGGGTATCGTTGGCCTGTTACGTTCGGCCAAGGGACCAAGG |
| | TGGAAATCAAACGG (SEQ ID NO: 280) |
| ABT1-95- | GACATCCAGATGACCCAGTCTCCATCCTCCCTGTCTGCATCTGTAGGAGACCGTGTCACCAT |
| 57 | CACTTGCCGGGCAAGTCAGCCGATTGTGGAGAACTTAAGGTGGTATCAGCAGAAACCAGGGA |
| | AAGCCCCTAAGCTCCTGATCTATTCTTCGTCCTATTTGGAGCCCGGGGTCCCATCACGTTTC |
| | AGTGGTAGTGGATCCGGGACAGATTTCACTCTCACCATCAGCAGTCTGCAACCCGAAGATTT |
| | TGCTACGTACCACTGTCAACAGGGGTATCGTTGGCCTGTTACGTTCGGCCAAGGGACCAAGG |
| | TGGAAATCAAACGG (SEQ ID NO: 281) |
| ABT1-95- | GACATCCAGATGACCCAGTCTCCATCCTCCCTGTCTGCATCTGTAGGAGACCGTGTCACCAT |
| 58 | CACTTGCCGGGCACGTCAGCCGATTGTGTCGAACTTAAGGTGGTATCAGCAGAAACCAGGGA |
| | AAGCCCCTAAGCTCCTGATCTATTCTTCGTCCTATTTGGAGCCCGGGGTCCCATCACGTTTC |
| | AGTGGTAGTGGATCCGGGACAGATTTCACTCTCACCATCAGCAGTCTGCAACCCGAAGATTT |
| | TGCTACGTACCACTGTCAACAGGGGTATCGTTGGCCTGTTACGTTCGGCCAAGGGACCAAGG |
| | TGGAAATCAAACGG (SEQ ID NO: 282) |
| ABT1-95- | GACATCCAGATGACCCAGTCTCCATCCTCCCTGTCTGCATCTGTAGGAGACCGTGTCACCAT |
| 59 | CACTTGCCGGGCAAGTCAGCCGATTGTGAAGAACTTAAGGTGGTATCAGCAGAAACCAGGGA |
| | AAGCCCCTAAGCTCCTGATCTATTCTTCGTCCTATTTGGAGCCCGGGGTCCCATCACGTTTC |
| | AGTGGTAGTGGATCCGGGACAGATTTCACTCTCACCATCAGCAGTCTGCAACCCGAAGATTT |
| | TGCTACGTACCACTGTCAACAGGGGTATCGTTGGCCTGTTACGTTCGGCCAAGGGACCAAGG |
| | TGGAAATCAAACGG (SEQ ID NO: 283) |
| ABT1-95- | GACATCCAGATGACCCAGTCTCCAGCCTCCCTGTCTGCATCTGTAGGAGACCGTGTCACCAT |
| 60 | CACTTGCCGGGCAAGTCAGCCGATTGTGGCCAACTTAAGGTGGTATCAGCAGAAACCAGGGA |
| | AAGCCCCTAAGCTCCTGATCTATTCTTCGTCCTATTTGGAGCCCGGGGTCCCATCACGTTTC |
| | AGTGGTAGTGGATCCGGGACAGATTTCACTCTCACCATCAGCAGTCTGCAACCCGAAGATTT |
| | TGCTACGTACCACTGTCAACAGGGGTATCGTTGGCCTGTTACGTTCGGCCAAGGGACCAAGG |
| | TGGAAATCAAACGG (SEQ ID NO: 284) |
| ABT1-95- | GACATCCAGATGACCCAGTCTCCATCCTCCCTGTCTGCATCTGTAGGAGACCGTGTCACCAT |
| 61 | CACTTGCCGGGCAAGTCAGCCGATTGTGCGGAACTTACGCTGGTATCAGCAGAAACCAGGGA |
| | AAGCCCCTAAGCTCCTGATCTATTCTTCGTCCTATTTGGAGCCCGGGGTCCCATCACGTTTC |
| | AGTGGTAGTGGATCCGGGACAGATTTCACTCTCACCATCAGCAGTCTGCAACCCGAAGATTT |
| | TGCTACGTACCACTGTCAACAGGGGTATCGTTGGCCTGTTACGTTCGGCCAAGGGACCAAGG |
| | TGGAAATCAAACGG (SEQ ID NO: 285) |
| ABT1-95- | GACATCCAGATGACCCAGTCTCCATCCTCCCTGTCTGCATCTGTAGGAGACCGTGTCACCAT |
| 62 | CACTTGCCGGGCAAGTCAGCCGATTGTGCGGAACTTAAGGTGGTATCAGCAGAAACCAGGGA |
| | AAGCCCCTAAGCTCCTGATCTACTCTTCGTCCTATTTGGAGCCCGGGGTCCCATCACGTTTC |
| | AGTGGTAGTGGATCCGGGACAGATTTCACTCTCACCATCAGCAGTCTGCAACCCGAAGATTT |
| | TGCTACGTACCACTGTCAACAGGGGTATCGTTGGCCTGTTACGTTCGGCCAAGGGACCAAGG |
| | TGGAAATCAAACGG (SEQ ID NO: 286) |
| ABT1-95- | GACATCCAGATGACCCAGTCTCCATCCTCCCTGTCTGCATCTGTAGGAGACCGTGTCACCAT |
| 63 | CACTTGCCGGGCAAGTCAGCCGATTGTGCGGAACTTAAGGTGGTATCAGCAGAAACTAGGGA |
| | AAGCCCCTAAGCTCCTGATCTTCTCTTCGTCCTATTTGGAGCCCGGGGTCCCATCACGTTTC |
| | AGTGGTAGTGGATCCGGGACAGATTTCACTCTCACCATCAGCAGTCTGCAACCCGAAGATTT |
| | TGCTACGTACCACTGTCAACAGGGGTATCGTTGGCCTGTTACGTTCGGCCAAGGGACCAAGG |
| | TGGAAATCAAACGG (SEQ ID NO: 287) |
| ABT1-95- | GACATCCAGATGACCCAGTCCCCATCCTCCCTGTCTGCATCTGTAGGAGACCGTGTCACCAT |
| 64 | CACTTGCCGGGCAAGTCAGCCGATTGTGCGGAACTTAAGGTGGTATCAGCAGAAACCAGGGA |
| | AAGCCCCTAAGCTCCTGGTCCACTCTTCGTCCTATTTGGAGCCCGGGGTCCCATCACGTTTC |
| | AGTGGTAGTGGATCCGGGACAGATTTCACTCTCACCATCAGCAGTCTGCAACCCGAAGATTT |
| | TGCTACGTACCACTGTCAACAGGGGTATCGTTGGCCTGTTACGTTCGGCCAAGGGACCAAGG |
| | TGGAAGTCAAACGG (SEQ ID NO: 288) |
| ABT1-95- | GACATCCAGATGACCCAGTCTCCATCCTCCCTGTCTGCATCTGTAGGAGACCGTGTCACCAT |
| 65 | CACTTGCCGGGCAAGTCAGCCGATTGTGCGGAACTTAAGGTGGTATCAGCAGAAACCAGGGA |
| | AAGCCCCTAAGCTCCTGATCTATGGCTCGTCCTATTTGGAGCCCGGGGTCCCATCACGTTTC |
| | AGTGGTAGTGGATCCGGGACAGATTTCACTCTCACCATCAGCAGTCTGCAACCCGAAGATTT |
| | TGCTACGTACCACTGTCAACAGGGGTATCGTTGGCCTGTTACGTTCGGCCAAGGGACCAAGG |
| | TGGAAATCAAACGG (SEQ ID NO: 289) |
| ABT1-95- | GACATCCAGATGACCCAGTCTCCATCCTCCCTGTCTGCATCTGTAGGAGACCGTGTCACCAT |
| 66 | CACTTGCCGGGCAAGTCAGCCGATTGTGCGGAACTTAAGGTGGTATCAGCAGAAACCAGGGA |
| | AAGCCCCTAAGCTCCTGGTCTATTTCTCGTCCTATTTGGAGCCCGGGGTCCCATCACGTTTC |
| | AGTGGTAGTGGATCCGGGACAGATTTCACTCTCACCATCAGCAGTCTGCAACCCGAAGATTT |
| | TGCTACGTACCACTGTCAACAGGGGTATCGTTGGCCTGTTACGTTCGGCCAAGGGACCAAGG |
| | TGGAAATCAAACGG (SEQ ID NO: 290) |
| ABT1-95- | GACATCCAGATGACCCAGTCTCCATCCTCCCTGTCTGCATCTGTAGGAGACCGTGTCACCAT |
| 67 | CACTTGCCGGGCAAGTCAGCCGATTGTGCGGAACTTAAGGTGGTATCAGCAGAAACCAGGGA |
| | AAGCCCCTAAGCTCCTGATCTATGCGTCGTCCTATTTGGAGCCCGGGGTCCCATCACGTTTC |
| | AGTGGTAGTGGATCCGGGACAGATTTCACTCTCACCATCAGCAGTCTGCAACCCGAAGATTT |
| | TGCTACGTACCACTGTCAACAGGGGTATCGTTGGCCTGTTACGTTCGGCCAAGGGACCAAGG |
| | TGGAAATCAAACGG (SEQ ID NO: 291) |
| ABT1-95- | GACATCCAGATGACCCAGTCTCCATCCTCCCTGTCTGCATCTGTAGGAGACCGTGTCACCAT |
| 68 | CACTTGCCGGGCAAGTCAGCCGATTGTGCGGAACTTAAGGTGGTATCAGCAGAAACCAGGGA |
| | AAGCCCCTAAGCTCCTGATCTATTCGTCGTCCTATTTGGAGCCCGGGGTCCCATCACGTTTC |
| | AGTGGTAGTGGATCCGGGACAGATTTCACTCTCACCATCAGCAGTCTGCAACCCGAAGATTT |
| | TGCTACGTACCACTGTCAACAGGGGTATCGTTGGCCTGTTACGTTCGGCCAAGGGACCAAGG |
| | TGGAAATCAAACGG (SEQ ID NO: 292) |
| ABT1-95- | GACATCCAGATGACCCAGTCTCCATCCTCCCTGTCTGCATCTGTAGGAGACCGTGTCACCAT |
| 69 | CACTTGCCGGGCAAGTCAGCCGATTGTGCGGAACTTAAGGTGGTATCAGCAGAAACCAGGGA |
| | AAGCCCCTAAGCTCCTGATCTATAAGTCGTCCTATTTGGAGCCCGGGGTCCCATCACGTTTC |
| | AGTGGTAGTGGATCCGGGACAGATTTCACTCTCACCATCAGCAGTCTGCAACCCGAAGATTT |
| | TGCTACGTACCACTGTCAACAGGGGTATCGTTGGCCTGTTACGTTCGGCCAAGGGACCAAGG |
| | TGGAAATCAAACGG (SEQ ID NO: 293) |
| ABT1-95- | GACATCCAGATGACCCAGTCTCCATCCTCCCTGTCTGCATCTGTAGGAGACCGTGTCACCAT |
| 70 | CACTTGCCGGGCAAGTCAGCCGATTGTGCGGAACTTAAGGTGGTATCAGCAGAAACCAGGGA |
| | AAGCCCCTAAGCTCCTGGTCTATGGCTCGTCCTATTTGGAGCCCGGGGTCCCATCACGTTTC |
| | AGTGGTAGTGGATCTGGGACAGATTTCACTCTCACCATCAGCAGTCTGCAACCCGAAGATTT |
| | TGCTACGTACCACTGTCAACAGGGGTATCGTTGGCCTGTTACGTTCGGCCAAGGGACCAAGG |
| | TGGAAATCAAACGG (SEQ ID NO: 294) |
| ABT1-95- | GACATCCAGATGACCCAGTCTCCATCCTCCCTGTCTGCATCTGTAGGAGACCGTGTCACCAT |
| 71 | CACTTGCCGGGCAAGTCAGCCGATTGTGCGGAACTTAAGGTGGTATCAGCAGAAACCAGGGA |
| | AAGCCCCTAAGCTCCTGATCTATAACTCGTCCTATTTGGAGCCCGGGGTCCCATCACGTTTC |
| | AGTGGTAGTGGATCCGGGACAGATTTCACTCTCACCATCAGCAGTCTGCAACCCGAAGATTT |
| | TGCTACGTACCACTGTCAACAGGGGTATCGTTGGCCTGTTACGTTCGGCCAAGGGACCAAGG |
| | TGGAAATCAAACGG (SEQ ID NO: 295) |
| ABT1-95- | GACATCCAGATGACCCAGTCTCCATCCTCCCTGTCTGCATCTGTAGGAGACCGTGTCACCAT |
| 72 | CACTTGCCGGGCAAGTCAGCCGATTGTGCGGAACTTAAGGTGGTATCAGCAGAAACCAGGGA |
| | AAGCCCCTAAGCTCCTGATCTATCACTCGTCCTATTTGGAGCCCGGGGTCCCATCACGTTTC |
| | AGTGGTAGTGGATCCGGGACAGATTTCACTCTCACCATCAGCAGTCTGCAACCCGAAGATTT |
| | TGCTACGTACCACTGTCAACAGGGGTATCGTTGGCCTGTTACGTTCGGCCAAGGGACCAAGG |
| | TGGAAATCAAACGG (SEQ ID NO: 296) |
| ABT1-95- | GACATCCAGATGACCCAGTCTCCATCCTCCCTGTCTGCATCTGTAGGAGACCGTGTCACCAT |
| 73 | CACTTGCCGGGCAAGTCAGCCGATTGTGCGGAACTTAAGGTGGTATCAGCAGAAACCAGGGA |
| | AAGCCCCTAAGCTCCTGATCTATCAGTCGTCCTATTTGGAGCCCGGGGTCCCATCACGTTTC |
| | AGTGGTAGTGGATCCGGGACAGATTTCACTCTCACCATCAGCAGTCTGCAACCCGAAGATTT |
| | TGCTACGTACCACTGTCAACAGGGGTATCGTTGGCCTGTTACGTTCGGCCAAGGGACCAAGG |
| | TGGAAATCAAACGG (SEQ ID NO: 297) |
| ABT1-95- | GACATCCAGATGACCCAGTCTCCATCCTCCCTGTCTGCATCTGTAGGAGACCGTGTCACCAT |
| 74 | CACTTGCCGGGCAAGTCAGCCGATTGTGCGGAACTTAAGGTGGTATCAGCAGAGACCAGGGA |
| | AAGCCCCTAAGCTCCTGATCTATTCTGGGTCCTATTTGGAGCCCGGGGTCCCATCACGTTTC |
| | AGTGGTAGTGGATCCGGGACAGATTTCACTCTCACCATCAGCAGTCTGCAACCCGAAGATTT |
| | TGCTACGTACCACTGTCAACAGGGGTATCGTTGGCCTGTTACGTTCGGCCAAGGGACCAAGG |
| | TGGAAATCAAACGG (SEQ ID NO: 298) |
| ABT1-95- | GACATCCAGATGACCCAGTCTCCATCCTCCCTGTCTGCATCTGTAGGAGACCGTGTCACCAT |
| 75 | CACTTGCCGGGCAAGTCAGCCGATTGTGCGGAACTTAAGGTGGTATCAGCAGAAACCAGGGA |
| | AAGCCCCTAAGCTCCTGATCTATTCTGCCTCCTATTTGGAGCCCGGGGTCCCATCACGTTTC |
| | AGTGGTAGTGGATCCGGGACAGATTTCACTCTCACCATCAGCAGTCTGCAACCCGAAGATTT |
| | TGCTACGTACCACTGTCAACAGGGGTATCGTTGGCCTGTTACGTTCGGCCAAGGGACCAAGG |
| | TGGAAATCAAACGG (SEQ ID NO: 299) |
| ABT1-95- | GACATCCAGATGACCCAGTCTCCATCCTCCCTGTCTGCATCTGTAGGAGACCGTGTCACCAT |
| 76 | CACTTGCCGGGCAAGTCAGCCGATTGTGCGGAACTTAAGGTGGTATCAGCAGAAACCAGGGA |
| | AAGCCCCTAAGCTCCTGATCTATTCTGGCTCCTATTTGGAGCCCGGGGTCCCATCACGTTTC |
| | AGTGGTAGTGGATCCGGGACAGATTTCACTCTCACCATCAGCAGTCTGCAACCCGAAGATTT |
| | TGCTACGTACCACTGTCAACAGGGGTATCGTTGGCCTGTTACGTTCGGCCAAGGGACCAAGG |
| | TGGAAATCAAACGG (SEQ ID NO: 300) |
| ABT1-95- | GACATCCAGATGACCCAGTCTCCATCCTCCCTGTCTGCATCTGTAGGAGACCGTGTCACCAT |
| 77 | CACTTGCCGGGCAAGTCAGCCGATTGTGCGGAACTTAAGGTGGTATCAGCAGAAACCAGGGA |
| | AAGCCCCTGAGCTCCTGATCTATTCTGGCTCCTATTTGGAGCCCGGGGTCCCATCACGTTTC |
| | AGTGGTAGTGGATCCGGGACAGATTTCACTCTCACCATCAGCAGTCTGCAACCCGAAGATTT |
| | TGCTACGTACCACTGTCAACAGGGGTATCGTTGGCCTGTTACGTTCGGCCAAGGGACCAAGG |
| | TGGAAATCAAACGG (SEQ ID NO: 301) |
| ABT1-95- | GACATCCAGATGACCCAGTCTCCATCCTCCCTGTCTGCATCTGTAGGAGACCGTGTCACCAT |
| 78 | CACTTGCCGGGCAAGTCAGCCGATTGTGCGGAACTTAAGGTGGTATCAGCAGAAACCAGGGA |
| | AAGCCCCTAAGCTCCTGATCTATTCTGAGTCCTATTTGGAGCCCGGGGTCCCATCACGTTTC |
| | AGTGGTAGTGGATCCGGGACAGATTTCACTCTCACCATCAGCAGTCTGCAACCCGAAGATTT |
| | TGCTACGTACCACTGTCAACAGGGGTATCGTTGGCCTGTTACGTTCGGCCAAGGGACCAAGG |
| | TGGAAATCAAACGG (SEQ ID NO: 302) |
| ABT1-95- | GACATCCAGATGACCCAGTCTCCATCCTCCCTGTCTGCATCTGTAGGAGACCGTGTCACCAT |
| 79 | CACTTGCCGGGCAAGTCAGCCGATTGTGCGGAACTTAAGGTGGTATCAGCAGAAACCAGGGA |
| | AAGCCCCTAAGCTCCTGATCTATTCTAGCTCCTATTTGGAGCCCGGGGTCCCATCACGTTTC |
| | AGTGGTAGTGGATCCGGGACAGATTTCACTCTCACCATCAGCAGTCTGCAACCCGAAGATTT |
| | TGCTACGTACCACTGTCAACAGGGGTATCGTTGGCCTGTTACGTTCGGCCAAGGGACCAAGG |
| | TGGAAATCAAACGG (SEQ ID NO: 303) |
| ABT1-95- | GACATCCAGATGACCCAGTCTCCATCCTCCCTGTCTGCATCTGTAGGAGACCGTGTCACCAT |
| 80 | CACTTGCCGGGCAAGTCAGCCGATTGTGCGGAACTTAAGGTGGTATCAGCAGAAACCAGGGA |
| | AAGCCCCTAAGCTCCTGATCTATTCTGTGTCCTATTTGGAGCCCGGGGTCCCATCACGTTTC |
| | AGTGGTAGTGGATCCGGGACAGATTTCACTCTCACCATCAGCAGTCTGCAACCCGAAGATTT |
| | TGCTACGTACCACTGTCAACAGGGGTATCGTTGGCCTGTTACGTTCGGCCAAGGGACCAAGG |
| | TGGAAATCAAACGG (SEQ ID NO: 304) |
| ABT1-95- | GACATCCAGATGACCCAGTCTCCATCCTTCCTGTCTGCATCTGTAGGAGACCGTGTCACCAT |
| 81 | CACTTGCCGGGCAAGTCAGCCGATTGTGCGGAACTTAAGGTGGTATCAGCAGAAACCAGGGA |
| | AAGCCCCTAAGCTCCTGATCTATTCTAGCTCCTATTTGGAGCCCGGGGTCCCATCACGTTTC |
| | AGTGGTAGTGGATCCGGGACAGATTTCACTCTCACCATCAGCAGTCTGCAACCCGAAGATTT |
| | TGCTACGTACCACTGTCAACAGGGGTATCGTTGGCCTGTTACGTTCGGCCAAGGGACCAAGG |
| | TGGAAATCAAACGG (SEQ ID NO: 305) |
| ABT1-95- | GACATCCCGATGACCCAGTCTCCATCCTCCCTGTCTGCATCTGTAGGAGACCGTGTCACTAT |
| 82 | CACTTGCCGGGCAAGTCAGCCGATTGTGCGGAACTTAAGGTGGTATCAGCAGAAACCAGGGA |
| | AAGCCCCTAAGCTCCTGATCTATTCTACCTCCTATTTGGAGCCCGGGGTCCCATCACGTTTC |
| | AGTGGTAGTGGATCCGGGACAGATTTCACTCTCACCATCAGCAGTCTGCAACCCGAAGATTT |
| | TGCTACGTACCACTGTCAACAGGGGTATCGTTGGCCTGTTACGTTCGGCCAAGGGACCAAGG |
| | TGGAAATCAAACGG (SEQ ID NO: 306) |
| ABT1-95- | GACATCCAGATGACCCAGTCTCCATCCTCCCTGTCTGCATCTGTAGGAGACCGTGTCACCAT |
| 83 | CACTTGCCGGGCAAGTCAGCCGATTGTGCGGAACTTAAGGTGGTATCAGCAGAAACCAGGGA |
| | AAGCCCCTAAGCTCCTGATCTATTCTTCGTCCTATTTGGAGCCCGGGGTCCCACCACGTTTC |
| | AGTGGTAGTGGATCCGGGACAGATTTCACTCTCACCATCAGCAGTCTGCAACCCGAAGATTT |
| | TGCTACGTACCACTGTCAACAGGGGTATCGTTGGCCTGTTACGTTCGGCCAAGGGACCAAGG |
| | TGGAAATCAAACGG (SEQ ID NO: 307) |
| ABT1-95- | GACATCCAGATGACCCAGTCTCCATCCTCCCTGTCTGCATCTGTAGGAGACCGTGTCACCAT |
| 84 | CACTTGCCGGGCAAGTCAGCCGATTGTGCGGAACTTAAGGTGGTATCAGCAGAAACCAGGGA |
| | AAGCCCCTAAGCTCCTGATCTATTCTTGGTCCTATTTGGAGCCCGGGGTCCCATCACGTTTC |
| | AGTGGTAGTGGATCCGGGACAGATTTCACTCTCACCATCAGCAGTCTGCAACCCGAAGATTT |
| | TGCTACGTACCACTGTCAACAGGGGTATCGTTGGCCTGTTACGTTCGGCCAAGGGACCAAGG |
| | TGGAAATCAAACGG (SEQ ID NO: 308) |
| ABT1-95- | GACATCCAGATGACCCAGTCTCCATCCTCCCTGTCTGCATCTGTAGGAGACCGTGTCACCAT |
| 85 | CACTTGCCGGGCAGGTCAGCCGATTGTGCGGAACTTAAGGTGGTATCAGCAGAAACCAGGGA |
| | AAGCCCCTAAGCTCCTGATCTATTCTGGGTCCTATTTGGAGCCCGGGGTCCCATCACGTTTC |
| | AGTGGTAGTGGATCCGGGACAGATTTCACTCTCACCATCAGCAGTCTGCAACCCGAAGATTT |
| | TGCTACGTACCACTGTCTACAGGGGTATCGTTGGCCTGTTACGTTCGGCCAAGGGACCAAGG |
| | TGGAAATCAAACGG (SEQ ID NO: 309) |
| ABT1-95- | GACATCCAGATGACCCAGTCTCCATCCTCCCTGTCTGCATCTGTAGGAGACCGTGTCACCAT |
| 86 | CACTTGCCGGGCAAGTCAGCCGATTGTGCGGAACTTAAGGTGGTATCAGCAGAAACCAGGGA |
| | AAGCCCCTAAGCTCCTGATCTATTCTACGTCCTATTTGGAGCCCGGGGTCCCATCACGTTTC |
| | AGTGGTAGTGGATCCGGGACAGATTTCACTCTCACCATCAGCAGTCTGCAACCCGAAGATTT |
| | TGCTACGTACCACTGTCAACAGGGGTATCGTTGGCCTGTTACGTTCGGCCAAGGGACCAAGG |
| | TGGAAATCAAACGG (SEQ ID NO: 310) |
| ABT1-95- | GACATCCAGATGACCCAGTCTCCATCCTCCCTGTCTGCATCTGTAGGAGACCGTGTCACCAT |
| 87 | CACTTGCCGGGCAAGTCAGCCGATTGTGCGGAACTTAAGGTGGTATCAGCAGAAACCAGGGA |
| | AAGCCCCTAAGCTCCTGATCTATTCTTCGTCCCGGTTGGAGCCCGGGGTCCCATCACGTTTC |
| | AGTGGTAGTGGATCCGGGACAGATTTCACTCTCACCATCAGCAGTCTGCAACCCGAAGATTT |
| | TGCTACGTACCACTGTCAACAGGGGTATCGTTGGCCTGTTACGTTCGGCCAAGGGACCAAGG |
| | TGGAAATCAAACGG (SEQ ID NO: 311) |
| ABT1-95- | GACATCCAGATGACCCAGTCTCCATCCTCCCTGTCTGCATCTGTAGGAGACCGTGTCACCAT |
| 88 | CACTTGCCGGGCAAGTCAGCCGATTGTGCGGAACTTAAGGTGGTATCAGCAGAAACCAGGGA |
| | AAGCCCCTAAGCTCCTGATCTATTCTTCGTCCTACTTGGAGCCCGGGGTCCCATCACGTTTC |
| | AGTGGTAGTGGATCCGGGACAGATTTCACTCTCACCATCAGCAGTCTGCAACCCGAAGATTT |
| | TGCTACGTACCACTGTCAACAGGGGTATCGTTGGCCTGTTACGTTCGGCCAAGGGACCAAGG |
| | TGGAAATCAAACGG(SEQ ID NO: 312) |
| ABT1-95- | GACATCCAGATGACCCAGTCTCCATCCTCCCTGTCTGCATCTGTAGGAGACCGTGTCACCAT |
| 89 | CACTTGCCGGGCAAGTCAGCCGATTGTGCGGAACTTAAGGTGGTATCAGCAGAAACCAGGGA |
| | AAGCCCCTAAGCTCCTGATCTATTCTTCGTCCCTCTTGGAGCCCGGGGTCCCATCACGTTTC |
| | AGTGGTAGTGGATCCGGGACAGATTTCACTCTCACCATCAGCAGTCTGCAACCCGAAGATTT |
| | TGCTACGTACCACTGTCAACAGGGGTATCGTTGGCCTGTTACGTTCGGCCAAGGGACCAAGG |
| | TGGAAATCAAACGG (SEQ ID NO: 313) |
| ABT1-95- | GACATCCAGATGACCCAGTCTCCATCCTCCCTGTCTGCATCTGTAGGAGACCGTGTCACCAT |
| 90 | CACTTGCCGGGCAAGTCAGCCGATTGTGCGGAACTTAAGGTGGTATCAGCAGAAACCAGGGA |
| | AAGCCCCTAAGCTCCTGATCTATTCTTCGTCCCAGTTGGAGCCCGGGGTCCCATCACGTTTC |
| | AGTGGTAGTGGATCCGGGACAGATTTCACTCTCACCATCAGCAGTCTGCAACCCGAAGATTT |
| | TGCTACGTACCACTGTCAACAGGGGTATCGTTGGCCTGTTACGTTCGGCCAAGGGACCAAGG |
| | TGGAAATCAAACGG (SEQ ID NO: 314) |
| ABT1-95- | GACATCCAGATGACCCAGTCTCCATCCTCCCTGTCTGCATCTGTAGGAGACCGTGTCACCAT |
| 91 | CACTTGCCGGGCGAGTCAGCCGATTGTGCGGAACTTAAGGTGGTATCAGCAGAAACCAGGGA |
| | AAGCCCCTAAGCTCCTGATCTATTCTTCGTCCAATTTGGAGCCCGGGGTCCCATCACGTTTC |
| | AGTGGTAGTGGATCCGGGACAGATTTCACTCTCACCATCAGCAGTCTGCAACCCGAAGATTT |
| | TGCTACGTACCACTGTCAACAGGGGTATCGTTGGCCTGTTACGTTCGGCCAAGGGACCAAGG |
| | TGGAAATCAAACGG (SEQ ID NO: 315) |
| ABT1-95- | GACATCCAGATGACCCAGTCTCCATCCTCCCTGTCTGCATCTGTAGGAGACCGTGTCACCAT |
| 92 | CACTTGCCGGGCAAGTCAGCCGATTGTGCGGAACTTAAGGTGGTATCAGCAGAAACCAGGGA |
| | AAGCCCCTAAGCTCCTGATCTATTCTTCGTCCACCTTGGAGCCCGGGGTCCCATCACGTTTC |
| | AGTGGTAGTGGATCCGGGACAGATTTCACTCTCACCATCAGCAGTCTGCAACCCGAAGATTT |
| | TGCTACGTACCACTGTCAACAGGGGTATCGTTGGCCTGTTACGTTCGGCCAAGGGACCAAGG |
| | TGGAAATCAAACGG (SEQ ID NO: 316) |
| ABT1-95- | GACATCCAGATGACCCAGTCTCCATCCTCCCTGTCTGCATCTGTAGGAGACCGTGTCACCAT |
| 93 | CACTTGCCGGGCAAGTCAGCCGATTGTGCGGAACTTAAGGTGGTATCAGCAGAAACCAGGGA |
| | AAGCCCCTAAGCTCCTGATCTATTCTTCGTCCATCTTGGAGCCCGGGGTCCCATCACGTTTC |
| | AGTGGTGGTGGATCCGGGACAGATTTCACTCTCACCATCAGCAGTCTGCAACCCGAAGATTT |
| | TGCTACGTACCACTGTCAACAGGGGTATCGTTGGCCTGTTACGTTCGGCCAAGGGACCAAGG |
| | TGGAAATCAAACGG (SEQ ID NO: 317) |
| ABT1-95- | GACATCCAGATGACCCAGTCTCCATCCTCCCTGTCTGCATCTGTAGGAGACCGTGTCACCAT |
| 94 | CACTTGCCGGGCAAGTCAGCCGATTGTGCGGAACTTAAGGTGGTATCAGCAGAAACCAGGGA |
| | AAGCCCCTAAGCTCCTGATCTATTCTTCGTCCTCCTTGGAGCCCGGGGTCCCATCACGTTTC |
| | AGTGGTAGTGGATCCGGGACAGATTTCACTCTCACCATCAGCAGTCTGCAACCCGAAGATTT |
| | TGCTACGTACCACTGTCAACAGGGGTATCGTTGGCCTGTTACGTTCGGCCAAGGGACCAAGG |
| | TGGAAATCAAACGG (SEQ ID NO: 318) |
| ABT1-95- | GACATCCAGATGATCCAGTCTCCATCCTCCCTGTCTGCATCTGTAGGAGACCGTGTCACCAT |
| 95 | CACTTGCCGGGCAAGTCAGCCGATTGTGCGGAACTTAAGGTGGTATCAGCAGAAACCAGGGA |
| | AAGCCCCTAAGCTCCTGATCTATTCTTCGTCCCAGTTGGAGCCCGGGGTCCCATCACGTTTC |
| | AGTGGTAGTGGATCCGGGACAGATTTCACTCTCACCATCAGCAGTCTGCAACCCGAAGATTT |
| | TGCTACGTACCACTGTCAACAGGGGTATCGTTGGCCTGTTACGTTCGGCCAAGGGACCAAGG |
| | TGGAAATCAAACGG (SEQ ID NO: 319) |
| ABT1-95- | GACATCCAGATGACCCAGTCTCCATCCTCCCTGTCTGCATCTGTAGGAGACCGTGTCACCAT |
| 96 | CGCTTGCCGGGCAAGTCAGCCGATTGTGCGGAACTTAAGGTGGTATCAGCAGAAACCAGGGA |
| | AAGCCCCTAAGCTCCTGATCTATTCTTCGTCCAGGTTGGAGCCCGGGGTCCCATCACGTTTC |
| | AGTGGTAGTGGATCCGGGACAGATTTCACTCTCACCATCAGCAGTCTGCAACCCGAAGATTT |
| | TGCTACGTACCACTGTCAACAGGGGTATCGTTGGCCTGTTACGTTCGGCCAAGGGACCAAGG |
| | TGGAAATCAAACGG (SEQ ID NO: 320) |
| ABT1-95- | GACATCCAGATGACCCAGTCTCCATCCTCCCTGTCTGCATCTGTAGGAGACCGTGTCACCAT |
| 97 | CACTTGCCGGGCAAGTCAGCCGATTGTGCGGAACTTAAGGTGGTATCAGCAGAAACCAGGGA |
| | AAGCCCCTAAGCTCCTGATCTATTCTTCGTCCTTCTTGGAGCCCGGGGTCCCATCACGTTTC |
| | AGTGGTAGTGGATCCGGGACAGATTTCACTCTCACCATCAGCAGTCTGCAACCCGAAGATTT |
| | TGCTACGTACCACTGTCAACAGGGGTATCGTTGGCCTGTTACGTTCGGCCAAGGGACCAAGG |
| | TGGAAATCAAACGG (SEQ ID NO: 321) |
| ABT1-95- | GACATCCAGATGACCCAGTCTCCATCCTCCCTGTCTGCATCTGTAGGAGACCGTGTCACCAT |
| 98 | CACTTGCCGGGCAAGTCAGCCGATTGTGCGGAACTTAAGGTGGTATCAGCAGAAACCAGGGA |
| | AAGCCCCTAAGCTCCTGATCTATTCTTCGTCCGCGTTGGAGCCCGGGGTCCCATCACGTTTC |
| | AGTGGTAGTGGATCCGGGACAGATTTCACTCTCACCATCAGCAGTCTGCAACCCGAAGATTT |
| | TGCTACGTACCACTGTCAACAGGGGTATCGTTGGCCTGTTACGTTCGGCCAAGGGACCAAGG |
| | TGGAAATCAAACGG (SEQ ID NO: 322) |
| ABT1-95- | GACATCCAGATGACCCAGTCTCCATCCTCCCTGTCTGCATCTGTAGGAGACCGTGTCTCCAT |
| 99 | CACTTGCCGGGCAAGTCAGCCGATTGTGCGGAACTTAAGGTGGTATCAGCAGAAACCAGGGA |
| | AAGCCCCTAAGCTCCTGATCTATTCTTCGTCCACGTTGGAGCCCGGGGTCCCATCACGTTTC |
| | AGTGGTAGTGGATCCGGGACAGATTTCACTCTCACCATCAGCAGTCTGCAACCCGAAGATTT |
| | TGCTACGTACCACTGTCAACAGGGGTATCGTTGGCCTGTTACGTTCGGCCAAGGGACCAAGG |
| | TGGAAATCAAACGG (SEQ ID NO: 323) |
| ABT1-95- | GACATCCAGATGACCCAGTCTCCATCCTCCCTGTCTGCATCTGTAGGAGACCGTGTCACCAT |
| 100 | CACTTGCCGGGCAAGTCGGCCGATTGTGCGGAACTTAAGGTGGTATCAGCAGAAACCAGGGA |
| | AAGCCCCTAAGCTCCTGATCTATTCTTCGTCCCTCTTGGAGCCCGGGGTCCCATCACGTTTC |
| | AGTGGTAGTGGATCCGGGACAGATTTCACTCTCACCATCAGCAGTCTGCAACCCGAAGATTT |
| | TGCTACGTACCACTGTCAACAGGGGTATCGTTGGCCTGTTACGTTCGGCCAAGGGACCAAGG |
| | TGGAAATCAAACGG (SEQ ID NO: 324) |
| ABT1-95- | GACATCCAGATGACCCAGTCTCCATCCTCCCTGTCTGCATCCGTAGGAGACCGTGTCACCAT |
| 101 | CACTTGCCGGGCGAGTCAGCCGATTGTGCGGAACTTAAGGTGGTATCAGCAGAAACCAGGGA |
| | AAGCCCCTAAGCTCCTGGTCTATTCTTCGTCCCTCTTGGAGCCCGGGGTCCCATCACGTTTC |
| | AGTGGTAGTGGATCCGGGACAGATTTCACTCTCACCATCAGCAGTCTGCAACCCGAAGATTT |
| | TGCTACGTACCACTGTCAACAGGGGTATCGTTGGCCTGTTACGTTCGGCCAAGGGACCAAGG |
| | TGGAAATCAAACGG (SEQ ID NO: 325) |
| ABT1-95- | GACATCCAGATGACCCAGTCTCCATCCTCCCTGTCTGCATCTGTAGGAGACCGTGTCACCAT |
| 102 | CACTTGCCGGGCAAGTCAGCCGATTGTGCGGAACTTAAGGTGGTATCAGCAGAAACCAGGGA |
| | AAGCCCCTAAGCTCCTGATCTATTCTTCGTCCTATTTGCAGCCCGGGGTCCCATCACGTTTC |
| | AGTGGTAGTGGATCCGGGACAGATTTCACTCTCACCATCAGCAGTCTGCAACCCGAAGATTT |
| | TGCTACGTACCACTGTCAACAGGGGTATCGTTGGCCTGTTACGTTCGGCCAAGGGACCAAGG |
| | TGGAAATCAAACGG (SEQ ID NO: 326) |
| ABT1-95- | GACATCCAGATGACCCAGTCTCCATCCTCCCTGTCTGCATCTGTAGGAGACCGTGTCACCAT |
| 103 | CACTTGCCGGGCAAGTCAGCCGATTGTGCGGAACTTAAGGTGGTATCAGCAGAAACCAGGGA |
| | AAGCCCCTAAGCTCCTGATCTATTCTTCGTCCTATTTGGAGAAGGGGGTCCCATCACGTTTC |
| | AGTGGTAGTGGATCCGGGACAGATTTCACTCTCACCATCAGCAGTCTGCAACCCGAAGATTT |
| | TGCTACGTACCACTGTCAACAGGGGTATCGTTGGCCTGTTACGTTCGGCCAAGGGACCAAGG |
| | TGGAAATCAAACGG (SEQ ID NO: 327) |
| ABT1-95- | GACATCCAGATGACCCAGTCTCCATCCTCCCTGTCTGCATCTGTAGGAGACCGTGTCACCAT |
| 104 | CACTTGCCGGGCAAGTCAGCCGATTGTGCGGAACTTAAGGTGGTATCAGCAGAAACCAGGGA |
| | AAGCCCCTAAGCTCCTGATCTATTCTTCGTCCTATTTGGAGTCCGGGGTCCCATCACGTTTC |
| | AGTGGTAGTGGATCCGGGACAGATTTCACTCTCACCATCAGCAGTCTGCAACCCGAAGATTT |
| | TGCTACGTACCACTGTCAACAGGGGTATCGTTGGCCTGTTACGTTCGGCCAAGGGACCAAGG |
| | TGGAAATCAAACGG (SEQ ID NO: 328) |
| ABT1-95- | GACATCCAGATGACCCAGTCTCCATCCTCCCTGTCTGCATCTGTAGGAGACCGTGTCACCAT |
| 105 | CACTTGCCGGGCAAGTCAGCCGATTGTGCGGAACTTAAGGTGGTATCAGCAGAAACCAGGGA |
| | AAGCCCCTAAGCTCCTGATCTATTCTTCGTCCTATTTGGAGCGCGGGGTCCCATCACGTTTC |
| | AGTGGTAGTGGATCCGGGACAGATTTCACTCTCACCATCAGCAGTCTGCAACCCGAAGATTT |
| | TGCTACGTACCACTGTCAACAGGGGTATCGTTGGCCTGTTACGTTCGGCCAAGGGACCAAGG |
| | TGGAAATCAAACGG (SEQ ID NO: 329) |
| ABT1-95- | GACATCCAGATGACCCAGTCTCCATCCTCCCTGTCTGCATCTGTAGGAGACCGTGTCACCAT |
| 106 | CACTTGCCGGGCAAGTCAGCCGATTGTGCGGAACTTAAGGTGGTATCAGCAGAAACCAGGGA |
| | AAGCCCCTAAGCTCCTGATCTATTCTTCGTCCTATTTGGAGAGGGGGGTCCCATCACGTTTC |
| | AGTGGTAGTGGATCCGGGACAGATTTCACTCTCACCATCAGCAGTCTGCAACCCGAAGATTT |
| | TGCTACGTACCACTGTCAACAGGGGTATCGTTGGCCTGTTGCGTTCGGCCAAGGGACCAAGG |
| | TGGAAATCAAACGG (SEQ ID NO: 330) |
| ABT1-95- | GACATCCAGATGACCCAGTCTCCATCCTCCCTGTCTGCATCTGTAGGAGACCGTGTCACCAT |
| 107 | CACTTGCCGGGCAAGTCAGCCGATTGTGCGGAACTTAAGGTGGTATCAGCAGAAACCAGGGA |
| | AAGCCCCTAAGCTCCTGATCTATTCTTCGTCCTATTTGGAGCACGGGGTCCCATCACGTTTC |
| | AGTGGTAGTGGATCCGGGACAGATTTCACTCTCACCATCAGCAGTCTGCAACCCGAAGATTT |
| | TGCTACGTACCACTGTCAACAGGGGTATCGTTGGCCTGTTACGTTCGGCCAAGGGACCAAGG |
| | TGGAAATCAAACGG(SEQ ID NO: 331) |
| ABT1-95- | GACATCCAGATGACCCAGTCTCCATCCTCCCTGTCTGCATCTGTAGGAGACCGTGTCACCAT |
| 108 | CACTTGCCGGGCAAGTCAGCCGATTGTGCGGAACTTAAGGTGGTATCAGCAGAAACCAGGGA |
| | AAGCCCCTAAGCTCCTGATCTATTCTTCGTCCTATTTGGAGGAGGGGGTCCCATCACGTTTC |
| | AGTGGTAGTGGATCCGGGACAGATTTCACTCTCACCATCAGCAGTCTGCAACCCGAAGATTT |
| | TGCTACGTACCACTGTCAACAGGGGTATCGTTGGCCTGTTACGTTCGGCCAAGGGACCAAGG |
| | TGGAAATCAAACGG (SEQ ID NO: 332) |
| ABT1-95- | GACATCCAGATGACCCAGTCTCCATCCTCCCTGTCTGCATCTGTAGGAGACCGTGTCACCAT |
| 109 | CACTTGCCGGGCAAATCAGCCGATTGTGCGGAACTTAAGGTGGTATCAGCAGAAACCAGGGA |
| | AAGCCCCTAAGCTCCTGATCTATTCTTCGTCCTATTTGGAGAACGGGGTCCCATCACGTTTC |
| | AGTGGTAGTGGATCCGGGACAGATTTCACTCTCACCATCAGCAGTCTGCAACCCGAAGATTT |
| | TGCTACGTACCACTGTCAACAGGGGTATCGTTGGCCTGTTACGTTCGGCCAAGGGACCAAGG |
| | TGGAAATCAAACGG (SEQ ID NO: 333) |
| ABT1-95- | GACATCCAGATGACCCAGTCACCATCCTCCCTGTCTGCATCTGTAGGAGACCGTGTCACCAT |
| 110 | CACTTGCCGGGCAAGTCAGCCGATTGTGCGGAACTTAAGGTGGTATCAGCAGAAACCAGGGA |
| | AAGCCCCTAAGCTCCTGATCTATTCTTCGTCCTATTTGGAGGCGGGGGTCCCATCACGTTTC |
| | AGTGGTAGTGGATCCGGGACAGATTTCACTCTCACCATCAGCAGTCTGCAACCCGAAGATTT |
| | TGCTACGTACCACTGTCAACAGGGGTATCGTTGGCCTGTTACGTTCGGCCAAGGGACCAAGG |
| | TGGAAATCAAACGG (SEQ ID NO: 334) |
| ABT1-95- | GACATCCAGATGACCCAGTCTCCATCCTCCCTGTCTGCATCTGTAGGAGACCGTGTCACCAT |
| 111 | CACTTGCCGGGCAAGTCAGCCGATTGTGCGGAACTTAAGGTGGTATCAGCAGAAACCAGGGA |
| | AAGCCCCTAAGCTCCTGATCTATTCTTCGTCCTATTTGGAGGACGGGGTCCCATCACGTTTC |
| | AGTGGTAGTGGATCCGGGACAGATTTCACTCTCACCATCAGCAGTCTGCAACCCGAAGATTT |
| | TGCTACGTACCACTGTCAACAGGGGTATCGTTGGCCTGTTACGTTCGGCCAAGGGACCAAGG |
| | TGGAAATCAAACGG (SEQ ID NO: 335) |
| ABT1-95- | GACATCCAGATGACCCAGTCTCCATCCTCCCTGTCTGCATCTGTAGGAGACCGTGTCACCAT |
| 112 | CACTTGCCGGGCAAGTCAGCCGATTGTGCGGAACTTAAGGTGGTATCAGCAGAAACCAGGGA |
| | AAGCCCCTAAGCTCCTGATCTATTCTTCGTCCTATTTGGAGAACGGGGTCCCATCACGTTTC |
| | AGTGGTAGTGGATCCGGGACAGATTTCACTCTCACCATCAGCAGTCTGCAACCCGAAGATTT |
| | TGCTACGTACCACTGTCAACAGGGGTATCGTTGGCCTGTTACGTTCGGCCAAGGGACCAAGG |
| | TGGAAATCAAACGG (SEQ ID NO: 336) |
| ABT1-95- | GACATCCAGATGACCCAGTCTCCATCCTCCCTGTCTGCATCTGTAGGAGACCGTGTCACCAT |
| 113 | CACTTGCCGGGCAAGTCAGCCGATTGTGCGGAACTTAAGGTGGTATCAGCAGAAACCAGGGA |
| | AAGCCCCTAAGCTCCTGATCTATTCTTCGTCCTATTTGGAGCCCGGGGTCCCATCACGTTTC |
| | AGTGGTAGTGGATCCGGGACAGATTTCACTCTCACCATCAGCAGTCTGCAACCCGAAGATTT |
| | TGCTACGTACCACTGTCAACAGGGGTATCGTTGGCCTGTTACGTTCGGCCAAGGGACCAAGG |
| | TGGAAATCAAACGG (SEQ ID NO: 337) |
| ABT1-95- | GACATCCAGATGACCCAGTCTCCATCCTCCCTGTCTGCATCTGTAGGAGACCGTGTCACCAT |
| 114 | CACTTGCCGGGCAAGTCAGCCGATTGTGCGGAACTTAAGGTGGTATCAGCAGAAACCAGGGA |
| | AAGCCCCTAAGCTCCTGATCTATTCTTCGTCCTATTTGGAGGTGGGGGTCCCATCACGTTTC |
| | AGTGGTAGTGGATCCGGGACAGATTTCACTCTCACCATCAGCAGTCTGCAACCCGAAGATTT |
| | TGCTACGTACCACTGTCAACAGGGGTATCGTTGGCCTGTTACGTTCGGCCAAGGGACCAAGG |
| | TGGAAATCAAACGG (SEQ ID NO: 338) |
| ABT1-95- | GACATCCAGATGACCCAGTCTCCATCCTCCCTGTCTGCATCTGTAGGAGACCGTGTCACCAT |
| 115 | CACTTGCCGGGCAAGTCAGCCGATTGTGCGGAACTTAAGGTGGTATCAGCAGAAACCAGGGA |
| | AAGCCCCTAAGCTCCTGATCTATTCTTCGTCCTATTTGGAGCCCGGGGTCCCATCACGTTTC |
| | AGTGGTAGTGGATCCGGGACAGATTTCACTCTCACCATCAGCAGTCTGCAACCCGAAGATTT |
| | TGCTACGTACCACTGTTTGCAGGGGTATCGTTGGCCTGTTACGTTCGGCCAAGGGACCAAGG |
| | TGGAAATCAAACGG (SEQ ID NO: 339) |
| ABT1-95- | GACATCCAGATGACCCAGTCTCCATCCTCCCTGTCTGCATCTGTAGGAGACCGTGTCACCAT |
| 116 | CACTTGCCGGGCAAGTCAGCCGATTGTGCGGAACTTAAGGTGGTATCAGCAGAAACCAGGGA |
| | AAGCCCCTAAGCTCCTGATCTATTCTTCGTCCTATTTGGAGCCCGGGGTCCCATCACGTTTC |
| | AGTGGTAGTGGATCCGGGACAGATTTCACTCTCACCATCAGCAGTCTGCAACCCGAAGATTT |
| | TGCTACGTACCACTGTGTGCAGGGGTATCGTTGGCCTGTTACGTTCGGCCAAGGGACCAAGG |
| | TGGAAATCAAACGG (SEQ ID NO: 340) |
| ABT1-95- | GACATCCAGATGACCCAGTCTCCATCCTCCCTGTCTGCATCTGTAGGAGACCGTGTCACCAT |
| 117 | CACTTGCCGGGCAAGTCAGCCGATTGTGCGGAACTTAAGGTGGTATCAGCAGAAACCAGGGA |
| | AAGCCCCTAAGCTCCTGATCTATTCTTCGTCCTATTTGGAGCCCGGGGTCCCATCACGTTTC |
| | AGTGGTAGTGGATCCGGGACAGATTTCACTCTCACCATCAGCAGTCTGCAACCCGAAGATTT |
| | TGCTATGTACCACTGTGTCCAGGGGTATCGTTGGCCTGTTACGTTCGGCCAAGGGACCAAGG |
| | TGGAAATCAAACGG (SEQ ID NO: 341) |
| ABT1-95- | GACATCCAGATGACCCAGTCTCCATCCTCCCTGTCTGCATCTGTAGGAGACCGTGTCACCAT |
| 118 | CACTTGCCGGGCAAGTCAGCCGATTGTGCGGAACTTAAGGTGGTATCAGCAGAAACCAGGGA |
| | AAGCCCCTAAGCTCCTGATCTATTCTTCGTCCTATTTGGAGCCCGGGGTCCCATCACGTTTC |
| | AGTGGTAGTGGATCCGGGACAGATTTCACTCTCACCATCAGCAGTCTGCAACCCGAAGATTT |
| | TGCTACGTACCACTGTTCGCAGGGGTATCGTTGGCCTGTTACGTTCGGCCAAGGGACCAAGG |
| | TGGAAATCAAACGG (SEQ ID NO: 342) |
| ABT1-95- | GACATCCAGATGACCCAGTCTCCATCCTCCCTGTCTGCATCTGTAGGAGACCGTGTCACCAT |
| 119 | CACTTGCCGGGCAAGTCAGCCGATTGTGCGGAACTTAAGGTGGTATCAGCAGAAACCAGGGA |
| | AAGCCCCTAAGCTCCTGATCTATTCTTCGTCCTATTTGGAGCCCGGGGTCCCATCACGTTTC |
| | AGTGGTAGTGGATCCGGGACAGATTTCACTCTCACCATCAGCAGTCTGCAACCCGAAGATTT |
| | TGCTACGTACCACTGTGAGCAGGGGTATCGTTGGCCTGTTACGTTCGGCCAAGGGACCAAGG |
| | TGGAAATCAAACGG (SEQ ID NO: 343) |
| ABT1-95- | GACATCCAGATGACCCAGTCTCCATCCTCCCTGTCTGCATCTGTAGGAGACCGTGTCACCAT |
| 120 | CACTTGCCGGGCAAGTCAGCCGATTGCGCGGAACTTAAGGTGGTATCAGCAGAAACCAGGGA |
| | AAGCCCCTAAGCTCCTGATCTATTCTTCGTCCTATTTGGAGCCCGGGGTCCCATCACGTTTC |
| | AGTGGTAGTGGATCCGGGACAGATTTCACTCTCACCATCAGCAGTCTGCAACCCGAAGATTT |
| | TGCTACGTACCACTGTCAACAGGTGTATCGTTGGCCTGTTACGTTCGGCCAAGGGACCAAGG |
| | TGGAAATCAAACGG (SEQ ID NO: 344) |
| ABT1-95- | GACATCCAGATGACCCAGTCTCCATCCTCCCTGTCTGCATCTGTAGGAGACCGTGTCACCAT |
| 121 | CACTTGCCGGGCAAGTCAGCCGATTGTGCGGAACTTAAGGTGGTATCAGCAGAAACCAGGGA |
| | AAGCCCCTAAGCTCCTGATCTATTCTTCGTCCTATTTGGAGCCCGGGGTCCCATCACGTTTC |
| | AGTGGTAGTGGATCCGGGACAGATTTCACTCTCACCATCAGCAGTCTGCAACCCGAAGATTT |
| | TGCTACGTACCACTGTCAACAGGGGTATGAGTGGCCTGTTACGTTCGGCCAAGGGACCAAGG |
| | TGGAAATCAAACGG (SEQ ID NO: 345) |
| ABT1-95- | GACATCCAGATGACCCAGTCTCCATCCTCCCTGTCTGCATCTGTAGGAGACCGTGTCACCAT |
| 122 | CACTTGCCGGGCAAGTCAGCCGATTGTGCGGAACTTAAGGTGGTATCAGCAGAAACCAGGGA |
| | AAGCCCCTAAGCTCCTGATCTATTCTTCGTCCTATTTGGAGCCCGGGGTCCCATCACGTTTC |
| | AGTGGTAGTGGATCCGGGACAGATTTCATTCTCACCATCAGCAGTCTGCAACCCGAAGATTT |
| | TGCTACGTACCACTGTCAACAGGGGTATCGTTGGCCTGTTACGTTCGGCCAAGGGACCAAGG |
| | TGGAAATCAAACGG (SEQ ID NO: 346) |
| ABT1-95- | GACATCCAGATGACCCAGTCTCCATCCTCCCTGTCTGCATCTGTAGGAGACCGTGTCACCAT |
| 123 | CACTTGCCGGGCAAGTCAGCCGATTGTGCGGAACTTAAGGTGGTATCAGCAGAAACCAGGGA |
| | AAGCCCCTAAGCTCCTGATCTATTCTTCGTCCTATTTGGAGCCCGGGGTCCCATCACGTTTC |
| | AGTGGTAGTGGATCCGGGACAGATTTCACTCTCACCATCAGCAGTCTGCAACCCGAAGATTT |
| | TGCTACGTACCACTGTCAACAGGGGTATGCGTGGCCTGTTACGTTCGGCCAAGGGACCAAGG |
| | TGGAAATCAAACGG (SEQ ID NO: 347) |
| ABT1-95- | GACATCCAGATGACCCAGTCTCCATCCTCCCTGTCTGCATCTGTAGGAGACCGTGTCACCAT |
| 124 | CACTTGCCGGGCAAGTCAGCCGATTGTGCGGAACTTAAGGTGGTATCAGCAGAAACCAGGGA |
| | AAGCCCCTAAGCTCCTGATCTATTCTTCGTCCTATTTGGAGCCCGGGGTCCCATCACGTTTC |
| | AGTGGTAGTGGATCCGGGACAGATTTCACTCTCACCATCAGCAGTCTGCAACCCGAAGATTT |
| | TGCTACGTACCACTGTCAACAGGGGTATATGTGGCCTGTTACGTTCGGCCAAGGGACCAAGG |
| | TGGAAATCAAACGG (SEQ ID NO: 348) |
| ABT1-95- | GACATCCAGATGACCCAGTCTCCATCCTCCCTGTCTGCATCTGTAGGAGACCGTGTCACCAT |
| 125 | CACTTGCCGGGCAAGTCAGCCGATTGTGCGGAACTTAAGGTGGTATCAGCAGAAACCAGGGA |
| | AAGCCCCTAAGCTCCTGATCTATTCTTCGTCCTATTTGGAGCCCGGGGTCCCATCACGTTTC |
| | AGTGGTAGTGGATCCGGGACAGATTTCACTCTCACCATCAGCAGTCTGCAACCCGAAGATTT |
| | TGCTACGTACCACTGTCAACAGGGGTATCGTTGGCCTCTGACGTTCGGCCAAGGGACCAAGG |
| | TGGAAATCAAACGG (SEQ ID NO: 349) |
| ABT1-95- | GACATCCAGATGACCCAGTCTCCATCCTCCCTGTCTGCATCTGTAGGAGACCGTGTCACCAT |
| 126 | CACTTGCCGGGCAAGTCAGCCGATTGTGCGGAACTTAAGGTGGTATCAGCAGAAACCAGGGA |
| | AAGCCCCTAAGCTCCTGATCTATTCTTCGTCCTATTTGGAGCCCGGGGTCCCATCACGTTTC |
| | AGTGGTAGTGGATCCGGGACAGATTTCACTCTCACCATCAGCAGTCTGCAACCCGAAGATTT |
| | TGCTACGTACCACTGTCAACAGGGGTATCGTTGGCCTTCGACGTTCGGCCAAGGGACCAAGG |
| | TGGAAATCAAACGG (SEQ ID NO: 350) |
| ABT1-95- | GACATCCAGATGACCCAGTCTCCATCCTCCCTGTCTGCATCTGTAGGAGACCGTGTCACCAT |
| 127 | CACTTGCCGGGCAAGTCAGCCGATTGTGCGGAACTTAAGGTGGTATCAGCAGAAACCAGGGA |
| | AAGCCCCTAAGCTCCTGATCTATTCTTCGTCCTATTTGGAGCCCGGGGTCCCATCACGTTTC |
| | AGTGGTAGTGGATCCGGGACAGATTTCACTCTCACCATCGGCAGTCTGCAACCCGAAGATTT |
| | TGCTACGTACCACTGTCAACAGGGGTATCGTTGGCCTATTACGTTCGGCCAAGGGACCAAGG |
| | TGGAAATCAAACGG (SEQ ID NO: 351) |
| ABT1-95- | GACATCCAGATGACCCAGTCTCCATCCTCCCTGTCTGCATCTGTAGGAGACCGTGTCACCAT |
| 128 | CACTTGCCGGGCAAGTCAGCCGATTGTGCGGAACTTAAGGTGGTATCAGCAGAAACCAGGGA |
| | AAGCCCCTAAGCTCCTGATCTATTCTTCGTCCTATTTGGAGCCCGGGGTCCCATCACGTTTC |
| | AGTGGTAGTGGATCCGGGACAGATTTCACTCTCACCATCAGCAGTCTGCAACCCGAAGATTT |
| | TGCTACGTACCACTGTCAACAGGGGTATCGTTGGCCTGGCACGTTCGGCCAAGGGACCAAGG |
| | TGGAAATCAAGCGG (SEQ ID NO: 352) |
| ABT1-95- | GACATCCAGATGACCCAGTCTCCATCCTCCCTGTCTGCATCTGTAGGAGACCGTGTCACCAT |
| 129 | CACTTGCCGGGCAAGTCAGCCGATTGTGCGGAACTTAAGGTGGTATCAGCAGAAACCAGGGA |
| | AAGCCCCTAAGCTCCTGATCTATTCTTCGTCCTATTTGGAGCCCGGGGTCCCATCACGTTTC |
| | AGTGGTAGTGGATCCGGGACAGATTTCACTCTCACCATCAGCAGTCTGCACCCCGAAGATCT |
| | AGCTACGTACCACTGTCAACAGGGGTATCGTTGGCCTGTTACGTTCGGCCAAGGGACCAAGG |
| | TGGAAATCAAACGG (SEQ ID NO: 353) |
| ABT1-95- | GACATCCAGATGACCCAGTCTCCATCCTCCCTGTCTGCATCTGTAGGAGACCGTGTCACCAT |
| 130 | CACTTGCCGGGCAAGTCAGCCGATTGTGCGGAACTTAAGGTGGTATCAGCAGAAACCAGGGA |
| | AAGCCCCTAAGCTCCTGATCTATTCTTCGTCCTATTTGGAGCCCGGGGTCCCATCACGTTTC |
| | AGTGGTAGTGGATCCGGGACAGATTTCACTCTCACCATCAGCAGTCTGCAACCCGAAGATTT |
| | TGCTACGTACTACTGTCAACAGGGGTATCTGTGGCCTGTTACGTTCGGCCAAGGGACCAAGG |
| | TGGAAATCAAACGG (SEQ ID NO: 354) |
| ABT1-95- | GACATCCAGATGACCCAGTCTCCATCCTCCCTGTCTGCATCTGTAGGAGACCGTGTCACCAT |
| 131 | CACTTGCCGGGCAAGTCAGCCGACTGTGCGGAACCTAAGGTGGTACCAGCAGAAACCAGGGA |
| | AAGCCCCTAAGCTCCTGATCTATTCTTCGTCCTATTTGGAGCCCGGGGTCCCATCACGTTTC |
| | AGTGGTAGTGGATCCGGGACAGATTTCACTCTCACCATCAGCAGTCTGCAACCCGAAGATTT |
| | TGCTACGTACCACTGTCAACAGGGGTATCGTTGGCCTGTTACGTTCGGCCAAGGGACCAAGG |
| | TGGAAATCAAACGG (SEQ ID NO: 355) |
| ABT1-95- | GACATCCAGATGACCCAGTCTCCATCCTCCCTGTCTGCATCTGTAGGAGACCGTGTCACCAT |
| 132 | CACTTGCCGGGCAAGTCAGCCGATTGTGCGGAACTTAAGGTGGTATCAGCAGAAACCAGGGA |
| | TAGCCCCTAAGCTCCTGATCTATTCTTCGTCCTATTTGGAGCCCGGGGTCCCATCACGTTTC |
| | AGTGGTAGTGGATCCGGGACAGATTTCACTCTCACCATCAGCAGTCCGCAACCCGAAGATTT |
| | TGCTACGTACCACTGTCAACAGGGGTATCGTTGGCCTGTTACGTTCGGCCAAGGGACCAAGG |
| | TGGAAATCAAACGG (SEQ ID NO: 356) |
| ABT1-95- | GACATCCAGATGACCCAGTCTCCATCCTCCCTGTCTGCATCTGTAGGAGACCGTGTCACCAT |
| 133 | CACTTGCCGGGCAAGTCAGCCGATTGTGCGGAACTTAAGGTGGTATCAGCAGAAACCAGGGA |
| | AAGCCCCTAAGCTCCTGATCTATTCTTCGTCCTATTTGGAGCCCGGGGTCCCATCACGTTTC |
| | AGTGGTAGTGGATCCGGGACAGATTTCACTCTCACCATCAGCAGTCTGCAACCCGAAGATTT |
| | TGCTACGTACCACTGTCGCCAGGGGTATCGTTGGCCTGTTACGTTCGGCCAAGGGACCAAGG |
| | TGGAAATCAAACGG (SEQ ID NO: 357) |
| ABT1-95- | GACATCCAGATGACCCAGTCTCCATCCTCCCTGTCTGCATCTGTAGGAGACCGTGTCACCAT |
| 134 | CACTTGCCGGGCAAGTCAGCCGATTGTGCGGAACTTAAGGTGGTATCAGCAGAAACCAGGGA |
| | AAGCCCCTAAGCTCCTGATCTATTCTTCGTCCTATTTGGAGCCCGGGGTCCCATCACGTTTC |
| | AGTGGTAGTGGATCCGGGACAGATTTCACTCTCACCATCAGCAGTCTGCAACCCGAAGATTT |
| | TGCTACGTACCACTGTGCCCAGGGGTATCGTTGGCCTGTTACGTTCGGCCAAGGGACCAAGG |
| | TGGAAATCAAACGG (SEQ ID NO: 358) |
| ABT1-95- | GACATCCAGATGACCCAGTCTCCATCCTCCCTGTCTGCATCTGTAGGAGACCGTGTCACCAT |
| 135 | CACTTGCCGGGCAAGTCAGCCGATTGTGCGGAACTTAAGGTGGTATCAGCAGAAACCAGGGA |
| | AAGCCCCTAAGCTCCTGATCTATTCTTCGTCCTATTTGGAGCCCGGGGTCCCATCACGTTTC |
| | AGTGGTAGTGGATCCGGGACAGATTTCACTCTCACCATCAGCAGTCTGCAACCCGAAGATTT |
| | TGCTACGTACCACTGTCAACAGGGGTATTCCTGGCCTGTTACGTTCGGCCAAGGGACCAAGG |
| | TGGAAATCAAACGG (SEQ ID NO: 359) |
| ABT1-95- | GACATCCAGATGACCCAGTCTCCATCCTCCCTGTCTGCATCTGTAGGAGACCGTGTCACCAT |
| 136 | CACTTGCCGGGCAAGTCAGCCGATTGTGCGGAACTTAAGGTGGTATCAGCAGAAACCAGGGA |
| | AAGCCCCTAAGCTCCTGATCTATTCTTCGTCCTATTTGGAGCCCGGGGTCCCATCACGTTTC |
| | AGTGGTAGTGGATCCGGGACAGATTTCACTCTCACCATCAGCAGTCTGCACCCCGAAGATCT |
| | AGCTACGTACCACTGTCAACAGGGGTATGGCTGGCCTGTTACGTTCGGCCAAGGGACCAAGG |
| | TGGAAATCAAACGG (SEQ ID NO: 360) |
| ABT1-95- | GACATCCAGATGACCCAGTCTCCATCCTCCCTGTCTGCATCTGTAGGAGACCGTGTCACCAT |
| 137 | CACTTGCCGGGCAAGTCAGCCGATTGTGCGGAACTTAAGGTGGTATCAGCAGAAACCAGGGA |
| | AAGCCCCTAAGCTCCTGATCTATTCTTCGTCCTATTTGGAGCCCGGGGTCCCATCACGTTTC |
| | AGTGGTAGTGGATCCGGGACAGATTTCACTCTCACCATCAGCAGTCTGCAACCCGAAGATTT |
| | TGCTACGTACCACTGTCAACAGGGGTATCTGTGGCCTGTTACGTTCGGCCAAGGGACCAAGG |
| | TGGAAATCAAACGG (SEQ ID NO: 361) |
| ABT1-95- | GACATCCAGATGACCCAGTCTCCATCCTCCCTGTCTGCATCTGTAGGAGACCGTGTCACCAT |
| 139 | CACTTGCCGGGCAAGTCAGCAGATTGTGCGGAACTTAAGGTGGTATCAGCAGAAACCAGGGA |
| | AAGCCCCTAAGCTCCTGATCTATTCTTCGTCCTATTTGGAGCCCGGGGTCCCATCACGTTTC |
| | AGTGGTAGTGGATCCGGGACAGATTTCACTCTCACCATCAGCAGTCTGCAACCCGAAGATTT |
| | TGCTACGTACCACTGTCAACAGGGGTATCGTTGGCCTGTTACGTTCGGCCAAGGGACCAAGG |
| | TGGAAATCAAACGG (SEQ ID NO: 362) |
| ABT1-95- | GACATCCAGATGACCCAGTCTCCATCCTCCCTGTCTGCATCTGTAGGAGACCGTGTCACCAT |
| 140 | CACTTGCCGGGCAAGTCAGGGCATTGTGCGGAACTTAAGGTGGTATCAGCAGAAACCAGGGA |
| | AAGCCCCTAAGCTCCTGATCTATTCTTCGTCCTATTTGGAGCCCGGGGTCCCATCACGTTTC |
| | AGTGGTAGTGGATCCGGGACAGATTTCACTCTCACCATCAGCAGTCTGCAACCCGAAGATTT |
| | TGCTACGTACCACTGTCAACAGGGGTATCGTTGGCCTGTTACGTTCGGCCAAGGGACCAAGG |
| | TGGAAATCAAACGG (SEQ ID NO: 363) |
| ABT1-95- | GACATCCAGATGACCCAGTCTCCATCCTCCCTGTCTGCATCTGTAGGAGACCGTGTCACCAT |
| 141 | CACTTGCCGGGCAAGTCAGCCGATTTTGCGGAACTTAAGGTGGTATCAGCAGAAACCAGGGA |
| | AAGCCCCTAAGCTCCTGATCTATTCTTCGTCCTATTTGGAGCCCGGGGTCCCATCACGTTTC |
| | AGTGGTAGTGGATCCGGGACAGATTTCACTCTCACCATCAGCAGTCTGCAACCCGAAGATTT |
| | TGCTACGTACCACTGTCAACAGGGGTATCGTTGGCCTGTTACGTTCGGCCAAGGGACCAAGG |
| | TGGAAATCAAACGG (SEQ ID NO: 364) |
| ABT1-95- | GACATTCAGATGACCCAGTCTCCATCCTCCCTGTCTGCATCTGTAGGAGACCGTGTCACCAT |
| 142 | CACTTGCCGGGCAAGTCAGCCGATTACCCGGAACTTAAGGTGGTATCAGCAGAAACCAGGGA |
| | AAGCCCCTAAGCTCCTGATCTATTCTTCGTCCTATTTGGAGCCCGGGGTCCCATCACGTTTC |
| | AGTGGTAGTGGATCCGGGACAGATTTCACTCTCACCATCAGCAGTCTGCAACCCGAAGATTT |
| | TGCTACGTACCACTGTCAACAGGGGTATCGTTGGCCTGTTACGTTCGGCCAAGGGACCAAGG |
| | TGGAAATCAAACGG (SEQ ID NO: 365) |
| ABT1-95- | GACATCCAGATGACCCAGTCTCCATCCTCCCTGTCTGCATCTGTAGGAGACCGTGTCACCAT |
| 143 | CACTTGCCGGGCAAGTCAGCCGATTGTGCGGAACTTAAGGTGGTATCAGCAGAAACCAGGGA |
| | AAGCCCCTAAGCTCCTGATCACGTCTTCGTCCTATTTGGAGCCCGGGGTCCCATCACGTTTC |
| | AGTGGTAGTGGATCCGGGACAGATTTCACTCTCACCATCAGCAGTCTGCAACCCGAAGATTT |
| | TGCTACGTACCACTGTCAACAGGGGTATCGTTGGCCTGTTACGTTCGGCCAAGGGACCAAGG |
| | TGGAAATCAAACGG (SEQ ID NO: 366) |
| ABT1-95- | GACATCCAGATGACCCAGTCTCCATCCTCCCTGTCTGCATCTGTAGGAGACCGTGTCACCAT |
| 144 | CACTTGCCGGGCAAGTCAGCCGATTGTGCGGAACTTAAGGTGGTATCAGCAGAAACCTGGGA |
| | AAGCCCCTAAGCTCCTGATCTATTCTTCGTCCTATTTGAGCCCCGGGGTCCCATCACGTTTC |
| | AGTGGTAGTGGATCCGGGACAGATTTCACTCTCACCATCAGCAGTCTGCAACCCGAAGATTT |
| | TGCTACGTACCACTGTCAACAGGGGTATCGTTGGCCTGTTACGTTCGGCCAAGGGACCAAGG |
| | TGGAAATCAAACGG (SEQ ID NO: 367) |
| ABT1-95- | GACATCCAGATGACCCAGTCTCCATCCTCCCTGTCTGCATCTGTAGGAGACCATGTCACCAT |
| 145 | CACTTGCCGGGCAAGTCAGCCGATTGTGCGGAACTTAAGGTGGTATCAGCAGAAACCAGGGA |
| | AAGCCCCTAAGCTCCTGATCTATTCTTCGTCCTATTTGGTCCCCGGGGTCCCATCACGTTTC |
| | AGTGGTAGTGGATCCGGGACAGATTTCACTCTCACCATCAGCAGTCTGCAACCCGAAGATTT |
| | TGCTACGTACCACTGTCAACAGGGGTATCGTTGGCCTGTTACGTTCGGCCAAGGGACCAAGG |
| | TGGAAATCAAACGG (SEQ ID NO: 368) |
| ABT1-95- | GACATCCAGATGACCCAGTCTCCATCCTCCCTGTCTGCATCTGTAGGAGACCGTGTCACCAT |
| 146 | CACTTGCCGGGCAAGTCAGAACATTGTGCGGAACTTAAGGTGGTATCAGCAGAAACCAGGGA |
| | AAGCCCCTAAGCTCCTGATCTATTCTTCGTCCTATTTGGAGCCCGGGGTCCCATCACGTTTC |
| | AGTGGTAGTGGATCCGGGACAGATTTCACTCTCACCATCAGCAGTCTGCAACCCGAAGATTT |
| | TGCTACGTACCACTGTCAACAGGGGTATCGTTGGCCTGTTACGTTCGGCCAAGGGACCAAGG |
| | TGGAAATCAAACGG (SEQ ID NO: 369) |
| ABT1-95- | GACATCCAGATGACCCAGTCTCCATCCTCCCTGTCTGCATCTGTAGGAGACCGTGTCACCAT |
| 147 | CACTTGCTGGGCAAGTCAGGGGATTGTGCGGAACTTAAGGTGGTATCAGCAGAAACCAGGGA |
| | AAGCCCCTAAGCTCCTGATCTATTCTTCGTCCTATTTGGAGCCCGGGGTCCCATCACGTTTC |
| | AGTGGTAGTGGATCCGGGACAGATTTCACTCTCACCATCAGCAGTCTGCAACCCGAAGATTT |
| | TGCTACGTACCACTGTCAACAGGGGTATCGTTGGCCTGTTACGTTCGGCCAAGGGACCAAGG |
| | TGGAAATCAAACGG (SEQ ID NO: 370) |
| ABT1-95- | GACATCCAGATGACCCAGTCTCCATCCTCCCTGTCTGCATCTGTAGGAGACCGTGTCACCAT |
| 148 | CACTTGCCGGGCAAGTCAGACCATTGTGCGGAACTTAAGGTGGTATCAGCAGAAACCAGGGA |
| | AAGCCCCTAAGCTCCTGATCTATTCTTCGTCCTATTTGGAGCCCGGGGTCCCATCACGTTTC |
| | AGTGGTAGTGGATCCGGGACAGATTTCACTCTCACCATCAGCAGTCTGCAACCCGAAGATTT |
| | TGCTACGTACCACTGTCAACAGGGGTATCGTTGGCCTGTTACGTTCGGCCAAGGGACCAAGG |
| | TGGAAATCAAACGG (SEQ ID NO: 371) |
| ABT1-95- | GACATCCAGATGACCCAGTCTCCATCCTCCCTGTCTGCATCTGTAGGAGACCGTGTCACCAT |
| 149 | CACTTGCCGGGCAAGTCAGGCGATTGTGCGGAACTTAAGGTGGTATCAGCAGAAACCAGGGA |
| | AAGCCCCTAAGCTCCTGATCTATTCTTCGTCCTATTTGGAGCCCGGGGTCCCATCACGTTTC |
| | AGTGGTAGTGGATCCGGGACAGATTTCACTCTCACCATCAGCAGTCTGCAACCCGAAGATTT |
| | TGCTACGTACCACTGTCAACAGGGGTATCGTTGGCCTGTTACGTTCGGCCAAGGGACCAAGG |
| | TGGAAATCAAACGG (SEQ ID NO: 372) |
| ABT1-95- | GACATCCAGATGACCCAGTCTCCATCCTCCCTGTCTGCATCTGTAGGAGACCGTGTCACCAT |
| 150 | CACTTGCCGGGCAAGTCAGCACATTGTGCGGAACTTAAGGTGGTATCAGCAGAAACCAGGGA |
| | AAGCCCCTAAGCTCCTGATCTATTCTTCGTCCTATTTGGAGCCCGGGGTCCCATCACGTTTC |
| | AGTGGTAGTGGATCCGGGACAGATTTCACTCTCACCATCAGCAGTCTGCAACCCGAAGATTT |
| | TGCTACGTACCACTGTCAACAGGGGTATCGTTGGCCTGTTACGTTCGGCCAAGGGACCAAGG |
| | TGGAAATCAAACGG (SEQ ID NO: 373) |
| ABT1-95- | GACATCCAGATGACCCAGTCTCCATCCTCCCTGTCTGCATCTGTAGGAGACCGTGTCACCAT |
| 151 | CACTTGCCGGGCAGGTCAGCCGATTGTGCGGAACTTAAGGTGGTATCAGCAGAAACCAGGGA |
| | AAGCCCCTAAGCTCCTGATCTATTCTTCGTCCTATTTGGAGCCCGGGGTCCCATCACGTTTC |
| | AGTGGTAGTGGATCCGGGACAGATTTCACTCTCACCATCAGCAGTCTGCAACCCGAAGATTT |
| | TGCTACGTACCACTGTCAACAGGGGTATCGTTGGCCTGTTACGTTCGACCAAGGGACCAAGG |
| | TGGAAATCAAACGG (SEQ ID NO: 374) |
| ABT1-95- | GACATCCAGATGACCCAGTCTCCATCCTCCCTGTCTGCATCTGTAGGAGACCGTGTCACCAT |
| 152 | CACTTGCCGGGCAGGTCAGCCGATTCCGCGGAACTTAAGGTGGTATCAGCAGAAACCAGGGA |
| | AAGCCCCTAAGCTCCTGATCTATTCTTCGTCCTATTTGGAGCCCGGGGTCCCATCACGTTTC |
| | AGTGGTAGTGGATCCGGGACAGATTTCACTCTCACCATCAGCAGTCTGCAACCCGAAGATTT |
| | TGCTACGTACCACTGTCAACAGGGGTATCGTTGGCCTGTTACGTTCGGCCAAGGGACCAAGG |
| | TGGAAATCAAACGG (SEQ ID NO: 375) |
| ABT1-95- | GACATCCAGATGACCCAGTCTCCATCCTCCCTGTCTGCATCTGTAGGAGACCGTGTCACCAT |
| 153 | CACTTGCCGGGCAAGTCAGCCGATTATCCGGAACTTAAGGTGGTATCAGCAGAAACCAGGGA |
| | AAGCCCCTAAGCTCCTGATCTATTCTTCGTCCTATTTGGAGCCCGGGGTCCCATCACGTTTC |
| | AGTGGTAGTGGATCCGGGACAGGTTTCACTCTCACCATCAGCAGTCTGCAACCCGAAGATTT |
| | TGCTACGTACCACTGTCAACAGGGGTATCGTTGGCCTGTTACGTTCGGCCAAGGGACCAAGG |
| | TGGAAATCAAACGG (SEQ ID NO: 376) |
| ABT1-95- | GACATCCAGATGACCCAGTCTCCATCCTCCCTGTCTGCATCTGTAGGAGACCGTGTCACCAT |
| 154 | CACTTGCCGGGCAAGTCAGCCGATTGTGCGGAACTTAAGGTGGTATCAGCAGAAACCAGGGA |
| | AAGCCCCTAAGCTCCTGATCTCCTCTTCGTCCTATTTGGAGCCCGGGGTCCCATCACGTTTC |
| | AGTGGTAGTGGATCCGGGACAGATTTCACTCTCACCATCAGCAGTCTGCAACCCGAAGATTT |
| | TGCTACGTACCACTGTCAACAGGGGTATCGTTGGCCTGTTACGTTCGGCCAAGGGACCAAGG |
| | TGGAAATCAAACGG (SEQ ID NO: 377) |
| ABT1-95- | GACATCCAGATGACCCAGTCTCCATCCTCCCTGTCTGCATCTGTAGGAGACCGTGTCACCAT |
| 155 | CACTTGCCGGGCAAGTCAGCCGATTGTGCGGAACTTAAGGTGGTATCAGCAGAAACCAGGGA |
| | AAGCCCCTAAGCTCCTGATCACCTCTTCGTCCTATTTGGAGCCCGGGGTCCCATCACGTTTC |
| | AGTGGTAGTGGATCCGGGACAGATTTCACTCTCACCATCAGCAGTCTGCAACCCGAAGATTC |
| | CGCTACGTACCACTGTCAACAGGGGTATCGTTGGCCTGTTACGTTCGGCCAAGGGACCAAGG |
| | TGGAAATCAAACGG (SEQ ID NO: 378) |
| ABT1-95- | GACATCCAGATGACCCAGTCTCCATCCTCCCTGTCTGCATCTGTAGGAGACCGTGTCACCAT |
| 156 | CACTTGCCGGGCAAGTCAGCCGATTGTGCGGAACTTAAGGTGGTATCAGCAGAAACCAGGGA |
| | AAGCCCCTAAGCTCCTGATCGCCTCTTCGTCCTATTTGGAGCCCGGGGTCCCATCACGTTTC |
| | AGTGGTAGTGGATCCGGGACAGATTTCACTCTCACCATCAGCAGTCTGCAACCCGAAGATTT |
| | TGCTACGTACCACTGTCTACAGGGGTATCGTTGGCCTGTTACGTTCGGCCAAGGGACCAAGG |
| | TGGAAATCAAACGG (SEQ ID NO: 379) |
| ABT1-95- | GACATCCAGATGACCCAGTCTCCATCCTCCCTGTCTGCATCTGTAGGAGACCGTGTCACCAT |
| 157 | CACTTGCCGGGCAAGTCAGCCGATTGTGCGGAACTTAAGGTGGTATCAGCAGAAACCAGGGA |
| | AAGCCCCTAAGCTCCTGATCACGTCTTCGTCCTATTTGGAGCCCGGGGTCCCATCACGTTTC |
| | AGTGGTAGTGGATCCGGGGCAGATTTCACTCTCACCATCAGCAGTCTGCAACCCGAAGATTT |
| | TGCTACGTACCACTGTCAACAGGGGTATCGTTGGCCTGTTACGTTCGGCCAAGGGACCAAGG |
| | TGGAAATCAAACGG (SEQ ID NO: 380) |
| ABT1-95- | GACATCCAGATGACCCAGTCTCCATCCTCCCTGTCTGCATCTGTAGGAGACCGTGTCACCAT |
| 158 | CACTTGCCGGGCAAGTCAGCCGATTGTGCGGAACTTAAGGTGGTATCAGCAGAAACCAGGGA |
| | AAGCCCCTAAGCTCCTGATCTTCTCTTCGTCCTATTTGGAGCCCGGGGTCCCATCACGTTTC |
| | AGTGGTAGTGGATCCGGGACAGATTTCACTCTCACCATCAGCAGTCTGCAACCCGAAGATTT |
| | TGCTACGTACCACTGTCAACAGGGGTATCGTTGGCCTGTTACGTTCGGCCAAGGGACCAAGG |
| | TGGAAATCAAACGG (SEQ ID NO: 381) |
| ABT1-95- | GACATCCAGATGACCCAGTCTCCATCCTCCCTGTCTGCATCTGTAGGAGACCGTGTCACCA |
| 159 | TCACTTGCCGGGCAAGTCAGCCGATTGCGCGGAACTTAAGGTGGTATCAGCAGAAACCAGG |
| | GAAAGCCCCTAAGCTCCTGATCTATTCTTCGTCCTATTTGGAGCCCGGGGTCCCATCACGT |
| | TTCAGTGGTAGTGGATCCGGGACAGATTTCACTCTCACCATCAGCAGTCTGCAACCCGAAG |
| | ATTTTGCTACGTACCACTGTCAACAGGTGTATCGTTGGCCTGTTACGTTCGGCCAAGGGAC |
| | CAAGGTGGAAATCAAACGG (SEQ ID NO: 382) |
| ABT1-95- | GACATCCAGATGACCCAGTCTCCATCCTCCCTGTCTGCATCTGTAGGAGACCGTGTCACCA |
| 160 | TCACTTGCCGGGCAAGTCAGCCGATTGTGCGGAACTTAAGGTGGTATCAGCAGAAACCAGG |
| | GAAAGCCCCTAAGCTCCTGATCTATTCTTCATCCTATTTGGAGCCCGGGGTCCCATCACGT |
| | TTCAGTGGTAGTGGATCCGGGACAGATTTCACTCTCACCATCAGCAGTCTGCAACCCGAAG |
| | ATTTTGCTACGTACCACTGTCAACAGGGGTATGTGTGGCCTGTTACGTTCGGCCAAGGGAC |
| | CAAGGTGGAAATCAAACGG (SEQ ID NO: 383) |
| ABT1-95- | GACATCCAGATGACCCAGTCTCCATCCTCCCTGTCTGCATCTGTAGGAGACCGTGTCACCAT |
| 161 | CACTTGCCGGGCAAGTCAGCCGATTGTGCGGAACTTAAGGTGGTATCAGCAGAAACCAGGGA |
| | AAGCCCCTAAGCTCCTGATCTATTCTTCGTCCTATTTGGAGCCCGGGGTCCCATCACGTTTC |
| | AGTGGTAGTGGATCCGGGACAGATTTCACTCTCACCATCAGCAGTCTGCAACCCGAAGATTT |
| | TGCTACGTACCACTGTCAACAGGGGTATCGTTGGCCTCCGACGTTCGGCCAAGGGACCAAGG |
| | TGGAAATCAAACGG (SEQ ID NO: 384) |
| ABT1-95- | GACATCCAGATGACCCAGTCTCCATCCTCCCTGTCTGCATCTGTAGGAGACCGTGTCACCAT |
| 162 | CACTTGCCGGGCAAGTAAGCCGATTGTGCGGAACTTAAGGTGGTATCAGCAGAAACCAGGGA |
| | AAGCCCCTAAGCTCCTGATCTATTCTTCGTCCTATTTGGAGCCCGGGGTCCCATCACGTTTC |
| | AGTGGTAGTGGATCCGGGACAGATTTCACTCTCACCATCAGCAGTCTGCAACCCGAAGATTT |
| | TGCTACGTACCACTGTCAACAGGGGTATCGTTGGCCTGTTACGTTCGGCCAAGGGACCAAGG |
| | TGGAAATCAAACGG (SEQ ID NO: 385) |
| ABT1-95- | GACATCCAGATGACCCAGTCTCCATCCTCCCTGTCTGCATCTGTAGGAGACCGTGTCACCAT |
| 163 | CACTTGCCGGGCAAGTAGGCCGATTGTGCGGAACTTAAGGTGGTATCAGCAGAAACCAGGGA |
| | AAGCCCCTAAGCTCCTGATCTATTCTTCGTCCTATTTGGAGCCCGGGGTCCCATCACGTTTC |
| | AGTGGTAGTGGATCCGGGACAGATTTCACTCTCACCATCAGCAGTCTGCAACCCGAAGATTT |
| | TGCTACGTACCACTGTCAACAGGGGTATCGTTGGCCTGTTACGTTCGGCCAAGGGACCAAGG |
| | TGGAGATCAAACGG (SEQ ID NO: 386) |
| ABT1-95- | GACATCCAGATGACCCAGTCTCCATCCTCCCTGTCTGCATCTGTAGGAGACCGTGTCACCAT |
| 164 | CACTTGTCGGGCAAGTCAGCCGGGAGTGCGGAACTTAAGGTGGTATCAGCAGAAACCAGGGA |
| | AAGCCCCTAAGCTCCTGATCTATTCTTCGTCCTATTTGGAGCCCGGGGTCCCATCACGTTTC |
| | AGTGGTAGTGGATCCGGGACAGATTTCACTCTCACCATCAGCAGTCTGCAACCCGAAGATTT |
| | TGCTACGTACCACTGTCAACAGGGGTATCGTTGGCCTGTTACGTTCGGCCAAGGGACCAAGG |
| | TGGAAATCAAACGG (SEQ ID NO: 387) |
| ABT1-95- | GACATCCAGATGACCCAGTCTCCATCCTCCCTGTCTGCATCTGTAGGAGACCGTGTCACCAT |
| 165 | CACTTGCCGGGCAAGTCAGCCGATTGTGCGGAACATGAGGTGGTATCAGCAGAAACCAGGGA |
| | AAGCCCCTAAGCTCCTGATCTATTCTTCGTCCTATTTGGAGCCCGGGGTCCCATCACGTTTC |
| | AGTGGTAGTGGATCCGGGACAGATTTCACTCTCACCATCAGCAGTCTGCAACCCGAAGATTT |
| | TGCTACGTACCACTGTCAACAGGGGTATCGTTGGCCTGTTACGTTCGGCCAAGGGACCAAGG |
| | TGGAAATCAAACGG (SEQ ID NO: 388) |
| ABT1-95- | GACATCCAGATGACCCAGTCTCCATCCTCCCTGTCTGCATCTGTAGGAGACCGTGTCACCAT |
| 166 | CACTTGCCGGGCAAGTCAGCCGATTGTGCGGAACTTAAGGTGGTATCAGCAGAAACCAGGGA |
| | AAGCCCCTAAGCTCCTGATCTATTCTAAGTCCTATTTGGAGCCCGGGGTCCCATCACGTTTC |
| | AGTGGTAGTGGATCCGGGACAGATTTCACTCTCACCATCAGCAGTCTGCAACCCGAAGATTT |
| | TGCTACGTACCACTGTCAACAGGGGTATCGTTGGCCTGTTACGTTCGGCCAAGGGACCAAGG |
| | TGGAAATCAAACGG (SEQ ID NO: 389) |
| ABT1-95- | GACATCCAGATGACCCAGTCTCCATCCTCCCTGTCTGCATCTGTAGGAGACCGTGTCACCAT |
| 167 | CACTTGCCGGGCAAGTCAGCCGATTGTGCGGAACTTAAGGTGGTATCAGCAGAAACCAGGGA |
| | AAGCCCCTAAGCTCCTGATCTATTCTCGGTCCTATTTGGAGCCCGGGGTCCCATCACGTTTC |
| | AGTGGTAGTGGATCCGGGGCAGATTTCACTCTCACCATCAGCAGTCTGCAACCCGAAGATTT |
| | TGCTACGTACCACTGTCAACAGGGGTATCGTTGGCCTGTTACGTTCGGCCAAGGGACCAAGG |
| | TGGAAATCAAACGG (SEQ ID NO: 390) |
| ABT1-95- | GACATCCAGATGACCCAGTCTCCATCCTCCCTGTCTGCATCTGTAGGAGACCGTGTCACCAT |
| 168 | CACTTGCCGGGCAAGTCAGCCGATTGTGCGGAACTTAAGGTGGTATCAGCAGAAACCAGGGA |
| | AAGCCCCTAAGCTCCTGATCTATTCTTCGTCCTTTTTGGAGCCCGGGGTCCCATCACGTTTC |
| | AGTGGTAGTGGATCCGGGACAGATTTCACTCTCACCATCAGCAGTCTGCAACCCGAAGATTT |
| | TGCTACGTACCACTGTCAACAGGGGTATCGTTGGCCTGTTACGTTCGGCCAAGGGACCAAGG |
| | TGGAAATCAAACGG (SEQ ID NO: 391) |
| ABT1-95- | GACATCCAGATGACCCAGTCTCCATCCTCCCTGTCTGCATCTGTAGGAGACCGTGTCACCAT |
| 169 | CACTTGCCGGGCAAGTCAGCCGATTGTGCGGAACTTAAGGTGGTATCAGCAGAAACCAGGGA |
| | AAGCTCCTAAGCTCCTGATCTATGCAGTGTCCTATTTGGAGCCCGGGGTCCCATCACGTTTC |
| | AGTGGTAGTGGATCCGGGACAGATTTCACTCTCACCATCAGCAGTCTGCAACCCGAAGATTT |
| | TGCTACGTACCACTGTCAACAGGGGTATCGTTGGCCTGTTACGTTCGGCCAAGGGACCAAGG |
| | TGGAAATCAAACGG (SEQ ID NO: 392) |
| ABT1-95- | GACATCCAGATGACCCAGTCTCCATCCTCCCTGTCTGCATCTGTAGGAGACCGTGTCACCAT |
| 170 | CACTTGCCGGGCAAGTAGGCCGATTGTGCGGAACTTAAGGTGGTATCAGCAGAAACCAGGGA |
| | AAGCCCCTAAGCTCCTGATCTATGCGTCGTCCTATTTGGAGCCCGGGGTCCCATCACGTTTC |
| | AGTGGTAGTGGATCCGGGACAGATTTCACTCTCACCATCAGCAGTCTGCAACCCGAAGATTT |
| | TGCTACGTACCACTGTCAACAGGGGTATCGTTGGCCTGTTACGTTCGGCCAAGGGACCAAGG |
| | TGGAAATCAAACGG (SEQ ID NO: 393) |
| ABT1-95- | GACATCCAGATGACCCAGTCTCCATCCTCCCTGTCTGCATCTGTAGGAGACCGTGTCACCAT |
| 171 | CACTTGCCGGGCAAGTAGGCCGATTGTGCGGAACTTAAGGTGGTATCAGCAGAAACCAGGGA |
| | AAGCCCCTAAGCTCCTGATCTATTCTGTGTCCTATTTGGAGCCCGGGGTCCCATCACGTTTC |
| | AGTGGTAGTGGATCCGGGACAGATTTCACTCTCACCATCAGCAGTCTGCAACCCGAAGATTT |
| | TGCTACGTACCACTGTCAACAGGGGTATCGTTGGCCTGTTACGTTCGGCCAAGGGACCAAGG |
| | TGGAAATCAAACGG (SEQ ID NO: 394) |
| ABT1-95- | GACATCCAGATGACCCAGTCTCCATCCTCCCTGTCTGCATCTGTAGGAGACCGTGTCACCAT |
| 172 | CACTTGCCGGGCAAGTAGGCCGATTGTGCGGAATTTAAGGTGGTATCAGCAGAAACCAGGGA |
| | AAGCTCCTAAGCTCCTGATCTATGCAGTGTCCTATTTGGAGCCCGGGGTCCCATCACGTTTC |
| | AGTGGTAGTGGATCCGGGACAGATTTCACTCTCACCATCAGCAGTCTGCAACCCGAAGATTT |
| | TGCTACGTACCACTGTCAACAGGGGTATCGTTGGCCTGTTACGTTCGGCCAAGGGACCAAGG |
| | TGGAAATCAAACGG (SEQ ID NO: 395) |
| ABT1-95- | GACATCCAGATGACCCAGTCTCCATCCTCCCTGTCTGCATCTGTAGGAGACCGTGTCACCAT |
| 173 | CTCTTGCCGGGCAAGTAGGCCGATTGTGCGGAACTTAAGGTGGTATCAGCAGAAACCAGGGA |
| | AAGCCCCTAAGCTCCTGATCTATTCTTCGTCCTATTTGGAGCCCGGGGTCCCATCACGTTTC |
| | AGTGGTAGTGGATCCGGGACAGATTTCACTCTCACCATCAGCAGTCTGCAACCCGAAGATTT |
| | TGCTACGTACCACTGTCGCCAGGGGTATCGTTGGCCTGTTACGTTCGGCCAAGGGACCAAGG |
| | TGGAAATCAAACGG (SEQ ID NO: 396) |
| ABT1-95- | GACATCCAGATGACCCAGTCTCCATCCTCCCTATCTGCATCTGTAGGAGACCGTGTCACCAT |
| 174 | CACTTGCCGGGCAAGTAGGCCGATTGTGCGGAACTTAAGGTGGTATCAGCAGAAACCAGGGA |
| | AAGCCCCTAAGCTCCTGATCTATTCTGTGTCCTATTTGGAGCCCGGGGTCCCATCACGTTTC |
| | AGTGGTAGTGGATCCGGGACAGATTTCACTCTCACCATCAGCAGTCTGCAACCCGAAGATTT |
| | TGCTACGTACCACTGTCGGCAGGGGTATCGTTGGCCTGTTACGTTCGGCCAAGGGACCAAGG |
| | TGGAAATCAAACGG (SEQ ID NO: 397) |
| ABT1-95- | GACATCCAGATGACCCAGTCTCCATCCTCCCTGTCTGCATCTGTAGGAGACCGTGTCACCAT |
| 175 | CACTTGCCGGGCAAGTAGGCCGATTGTGCGGAACTTAAGGTGGTATCAGCAGAAACCAGGGA |
| | AAGCCCCTAAGCTCCTGATCTATGCGTCGTCCTATTTGGAGCCCGGGGTCCCATCACGTTTC |
| | AGTGGTAGTGGATCCGGGACAGATTTCACTCTCACCATCAGCAGTCTGCAACCCGAAGATTT |
| | TGCTACGTACCACTGTCGGCAGGGGTATCGTTGGCCTGTTACGTTCGGCCAAGGGACCAAGG |
| | TGGAAATCAAACGG (SEQ ID NO: 398) |
| ABT1-95- | GACATCCAGATGACCCAGTCTCCATCCTCCCTGTCTGCATCTGTAGGAGACCGTGTCACCAT |
| 176 | CACTTGCCGGGCAAGTAGGCCAATTGTGCGGAACTTAAGGTGGTATCAGCAGAAACCAGGGA |
| | AAGCTCCTAAGCTCCTGATCTATGCAGTGTCCTATTTGGAGCCCGGGGTCCCATCACGTTTC |
| | AGTGGTAGTGGATCCGGGACAGATTTCACTCTCACCATCAGCAGTCTGCAACCCGAAGATTT |
| | TGCTACGTACCACTGTCGGCAGGGGTATCGTTGGCCTGTTACGTTCGGCCAAGGGACCAAGG |
| | TGGAAATCAAACGG (SEQ ID NO: 399) |
| ABT1-95- | GACATCCAGATGACCCAGTCTCCATCCTCCCTGTCTGCATCTGTAGGAGACCGTGTCACCAT |
| 177 | CACTTGCCGGGCAAGTCAGCCGATTGTGCGGAACTTAAGGTGGTATCAGCAGAAACCAGGGA |
| | AAGCCCCTAAGCTCCTGATCTATGCGTCGTCCTATTTGGAGCCCGGGGTCCCATCACGTTTC |
| | AGTGGTAGTGGATCCGGGACAGATTTCACTCTCACCATCAGCAGTCTGCAACCCGAAGATTT |
| | TGCTACGTACCACTGTCGGCAGGGGTATCGTTGGCCTGTTACGTTCGGCCAAGGGACCAAGG |
| | TGGAAATCAAACGG (SEQ ID NO: 400) |
| ABT1-95- | GACATCCAGATGACCCAGTCTCCATCCTCCCTGTCTGCATCTGTAGGAGACCGTGTCACCAT |
| 178 | CACTTGCCGGGCAAGTCAGCCGATTGTGCGGAACTTAAGGTGGTATCAGCAGAAACCAGGGA |
| | AAGCCCCTAAGCTCCTGATCTATTCTGTGTCCTATTTGGAGCCCGGGGTCCCATCACGTTTC |
| | AGTGGTAGTGGATCCGGGACAGATTTCACTCTCACCATCAGCAGTCTGCAACCCGAAGATTT |
| | TGCTACGTACCACTGTCGGCAGGGGTATCGTTGGCCTGTTACGTTCGGCCAAGGGACCAAGG |
| | TGGAAATCAAACGG (SEQ ID NO: 401) |
| ABT1-95- | GACATCCAGATGACCCAGTCTCCATCCTCCCTGTCTGCATCTGTAGGAGACCGTGTCACCAT |
| 179 | CACTTGCCGGGCAAGTCAGCCGATTGTGCGGAACTTAAGGTGGTATCAGCAGAAACCAGGGA |
| | AAGCCCCTAAGCTCCTGATCTATTCTTCGTCCTATTTGGAGCCCGGGGTCCCATCACGTTTC |
| | AGTGGTAGTGGATCCGGGACAGATTTCACTCTCACCATCAGCAGTCTGCAACCCGAAGATTT |
| | TGCTACGTACCACTGTCGGCAGGGGTATCGTTGGCCTCCGACGTTCGGCCAAGGGACCAAGG |
| | TGGAAATCAAACGG (SEQ ID NO: 402) |
| ABT1-95- | GACATCCAGATGACCCAGTCTCCATCCTCCCTGTCTGCATCTGTAGGAGACCGTGTCACCAT |
| 181 | CACTTGCCGGGCTAGTAAGCCGATCGTGCGTAACATGAGGTGGTATCAGCAGAAACCAGGGA |
| | AAGCCCCTAAGCTCCTGATCTATTCGGTGTCCTATTTGGAACCCGGGGTCCCATCACGTTTC |
| | AGTGGTAGTGGATCCGGGACAGATTTCACTCTCACCATCAGCAGTCTGCAACCCGAAGATTT |
| | TGCTACGTACCACTGTCTTCAGGGGTATCGTTGGCCTCCTACATTCGGCCAAGGGACCAAGG |
| | TGGAAATCAAACGG (SEQ ID NO: 403) |
| ABT1-95- | GACATCCAGATGACCCAGTCTCCATCCTCCCTGTCTGCATCTGTAGGAGACCGTGTCACCAT |
| 182 | CACTTGCCGGGCTAGTAAGCCGGGTGTGCGTAACTTGAGGTGGTATCAGCAGAAACCAGGGA |
| | AAGCCCCTAAGCTCCTGATCTATTCGGTGTCCTATTTGGAACCCGGGGTCCCATCACGTTTC |
| | AGTGGTAGTGGATCCGGGACAGATTTCACTCTCACCATCAGCAGTCTGCAACCCGAAGATTT |
| | TGCTACGTACCACTGTCTTCAGGGGTATCGTTGGCCTCCTACATTCGGCCAAGGGACCAAGG |
| | TGGAAATCAAACGG (SEQ ID NO: 404) |
| ABT1-95- | GACATCCAGATGACCCAGTCTCCATCCTCCCTGTCTGCATCTGTAGGAGACCGTGTCACCAT |
| 183 | CACTTGCCGGGCAAGTCGGACGATAGTGCGGAACTTACGTTGGTACCAGCAGAAACCAGGGA |
| | AAGCCCCTAAGCTCCTGATCTATTCAAGGAGCTTTTTGGAGCCGGGGGTCCCATCACGTTTC |
| | AGTGGTAGTGGATCCGGGACAGATTTCACTCTCACCATCAGCAGTCTGCAACCCGAAGATTT |
| | TGCTACGTACCACTGTCTACAGGGGTATCGTTGGCCTCCTACGTTCGGCCAAGGGACCAAGG |
| | TGGAAATCAAACGG (SEQ ID NO: 405) |
| ABT1-95- | GACATCCAGATGACCCAGTCTCCATCCTCCCTGTCTGCATCTGTAGGAGACCGTGTCACCAT |
| 184 | CACTTGCCGGGCAAGTCGGACGCCTGTGCGGAACTTACGTTGGTATCAGCAGAAACCAGGGA |
| | AAGCCCCTAAGCTCCTGATCTATTCAAGGAGCTATTTGGAGCCGGGGGTCCCATCACGTTTC |
| | AGTGGTAGTGGATCCGGGACAGATTTCACTCTCACCATCAGCAGTCTGCAACCCGAAGATTT |
| | TGCTACGTACCACTGTCTACAGGGGTATCGTTGGCCTCCTACGTTCGGCCAAGGGACCAAGG |
| | TGGAAATCAAACGG (SEQ ID NO: 406) |
| ABT1-95- | GACATCCAGATGACCCAGTCTCCATCCTCCCTGTCTGCATCTGTAGGAGACCGTGTCACCAT |
| 500 | CACTTGCCGGGCAAGTCAGCCGATTCATGGGAATTTACGTTGGTATCAGCAGAAACCAGGGA |
| | AAGCCCCTAAGCTCCTGATCTATAATATCTCCAATTTGCAAAGTGGGGTCCCATCGCGTTTC |
| | AGTGGCAGTGGATCTGGAACAGATTTCACTCTCACCATCAGCAGTCTGCAACCTGAAGATTT |
| | TGCTACGTACCACTGTCAACAGGGGTATCGTTGGCCTGTTACGTTCGGCCAAGGGACCAAGG |
| | TGGAAATCAAACGG (SEQ ID NO: 407) |
| ABT1-95- | GACATCCAGATGACCCAGTCTCCATCCTCCCTGTCTGCATCTGTAGGAGACCGTGTCACCAT |
| 501 | CACTTGCCGGGCAAGTCAGCCGATTCATGGGAATTTACGTTGGTATCAGCAGAAACCGGGGA |
| | AAGCCCCTAAGCTCCTGATCTATAGTATTTCCAATTTGCAAAGTGGGGTCCCATCACGTTTC |
| | AGTGGCAGTGGATCTGGGACAGATTTCACTCTCACCATCAGCAGTCTGCAACCTGAAGATTT |
| | TGCTACGTACTACTGTCAACAGGGGTATCGTTGGCCTGTTACGTTCGGCCAAGGGACCAAGG |
| | TGGAAATCAAACGG (SEQ ID NO: 408) |
| ABT1-95- | GACATCCAGATGACCCAGTCTCCATCCTCCCTGTCTGTATCTGTAGGAGACCGTGTCACCAT |
| 502 | CACCTGCCGGGCAAGTCAGCCGATTCATGGGAATTTACGTTGGTATCAGCAGAAACCAGGGA |
| | AAGCCCCTAAGCTCCTGATCTATAATGTGTCCAGGTTGCAAAGTGGGGTCCCATCACGTTTC |
| | AGTGGCAGTGGATCTGGGACAGATTTCACTCTCACCATCAGCAGTCTGCAACCTGAAGATTT |
| | TGCTACGTACTACTGTCAACAGGGGTATCGTTGGCCTGTTACATTCGGCCAAGGGACCAAGG |
| | TGGAAATCAAACGG (SEQ ID NO: 409) |
| ABT1-95- | GACATCCAGATGACCCAGTCTCCATCCTCCCTGTCTGCATCTGTAGGAGACCGTGTCACCAT |
| 503 | CACTTGCCGGGCAAGTCAGCCGATTCATGGGAATTTACGTTGGTATCAGCAGAAACCAGGGA |
| | AAGCCCCTAAGCTCCTGATCTATAATGTGTCCAGGTTGCAAAGTGGGGTCCCATCACGTTTC |
| | AGTGGCAGTGGATCTGGGACAGATTTCACTCTCACCATCAGCAGTCTGCAACCTGAAGATTT |
| | TGCTACGTACTACTGTCAACAGGGGTATCGTTGGCCTGTTACGTTCGGCCGAGGGACCAAGG |
| | TGGAAATCAAACGG (SEQ ID NO: 410) |
| ABT1-95- | GACATCCAGATGACCCAGTCTCCATCCTCCCTGTCTGCATCTGTAGGAGACCGTGTCACCAT |
| A1 | CACTTGCCGAGCCAGTCGGCCGGGTGTGAGGAACTTAAGGTGGTATCAGCAGAAACCAGGGA |
| | AAGCCCCTAAGCTCCTGATCTATCATGTGAGCGATTTGGAGCCCGGGGTCCCATCACGTTTC |
| | AGTGGTAGTGGATCCGGGACAGATTTCACTCTCACCATCAGCAGTCTGCAACCCGAAGATTT |
| | TGCTACGTACCACTGTCGACAGGGGTATGTTTGGCCTGTTCCCTTCGACCAAGGGACCAAGG |
| | TGGAAATCAAACGT (SEQ ID NO: 411) |
| ABT1-95- | GACATCCAGATGACCCAGTCTCCATCCTCCCTGTCTGCATCTGTAGGAGACCGTGTCACCAT |
| A2 | CACTTGCCGGATACTTCAGCCCCCTGGCAGGAACTTAAGGTGGTATCAGCAGAAACCAGGGA |
| | AAGCCCCTAAGCTCCTGATCTATTCAAAGAGCTTTTTGGAGCCCGGGGTCCCATCACGTTTC |
| | AGTGGTAGTGGATCCGGGACAGATTTCACTCTCACCATCAGCAGTCTGCAACCCGAAGATTT |
| | TGCTACGTACCACTGTCAACAGGGGTATCGTTGGCCTGTTACGTTCGGCCAAGGGACCAAGG |
| | TGGAAATCAAACGT (SEQ ID NO: 412) |
| ABT1-95- | GACATCCAGATGACCCAGTCTCCATCCTCCCTGTCTGCATCTGTAGGAGACCGTGTCACCAT |
| A3 | CACTTGCCGGGCTAGTAAGCCGGGTGTGCGTAACATGAGGTGGTATCAGCAGAAACCAGGGA |
| | AAGCCCCTAAGCTCCTGATCTATTCGGTGTCCTATTTGGAACCCGGGGTCCCATCACGTTTC |
| | AGTGGTAGTGGATCCGGGACAGATTTCACTCTCACCATCAGCAGTCTGCAACCCGAAGATTT |
| | TGCTACGTACCACTGTCTTCAGGGGTATCGTTGGCCTCCTACATTCGGCCAAGGGACCAAGG |
| | TGGAAATCAAACGG (SEQ ID NO: 413) |
| ABT1-95- | GACATCCAGATGACCCAGTCTCCATCCTCCCTGTCTGCATCTGTAGGAGACCGTGTCACCAT |
| A5 | CACTTGCCGGGCAAGTCGGACGCCTGTGCGGAACTTACGTTGGTATCAGCAGAAACCAGGGA |
| | AAGCCCCTAAGCTCCTGATCTATTCAAGGAGCTTTTTGGAGCCGGGGGTCCCATCACGTTTC |
| | AGTGGTAGTGGATCCGGGACAGATTTCACTCTCACCATCAGCAGTCTGCAACCCGAAGATTT |
| | TGCTACGTACCACTGTCTACAGGGGTATCGTTGGCCTCCTACGTTCGGCCAAGGGACCAAGG |
| | TGGAAATCAAACGG (SEQ ID NO: 414) |
| ABT1-95- | GACATCCAGATGACCCAGTCTCCATCCTCCCTGTCTGCATCTGTAGGAGACCGTGTCACCAT |
| A6 | CACTTGCCGGGCTAGTAAGCCGGGTGTGCGTAACATGAGGTGGTATCAGCAGAAACCAGGGA |
| | AAGCCCCTAAGCTCCTGATCTATGCTAAATCCTATTTGGAGCCGGGGGTCCCATCACGTTTC |
| | AGTGGTAGTGGATCCGGGACAGATTTCACTCTCACCATCAGCAGTCTGCAACCCGAAGATTT |
| | TGCTACGTACCACTGTAAACAGGGGTATCGTTGGCCAGTTCAGTTCGGCCAAGGGACCAAGG |
| | TGGAAATCAAACGG (SEQ ID NO: 415) |
| ABT1-119 | GACATCCAGATGACCCAGTCTCCATCCTCCCTGTCTGCATCTGTAGGAGACCGTGTCACCAT |
| | CACTTGCCGGGCAAGTCAGGCGATTGGTGAGTGGTTAGGTTGGTACCAGCAGAAACCAGGGA |
| | AAGCCCCTAAGCTCCTGATCTATAGGACGTCCGTGTTGCAAAGTGGGGTCCCATCACGTTTC |
| | AGTGGCAGTGGATCTGGGACAGATTTCACTCTCACCATCAGCAGTCTGCAACCTGAAGATTT |
| | TGCTACGTACTACTGTCAACAGACTTCTTTTTTTCCTCCTACGTTCGGCCAAGGGACCAAGG |
| | TGGAAATCAAACGG (SEQ ID NO: 416) |
| ABT1-120 | GACATCCAGATGACCCAGTCTCCATCCTCCCTGTCTGCATCTGTAGGAGACCGTGTCACCAT |
| | CACTTGCCGGGCAAGTCAGAATATTTCTGTGCTTTTACGTTGGTACCAGCAGAAACCAGGGA |
| | AAGCCCCTAAGCTCCTGATCTATAATGCGTCCCAGTTGCAAAGTGGGGTCCCATCACGTTTC |
| | AGTGGCAGTGGATCTGGGACAGATTTCACTCTCACCATCAGCAGTCTGCAACCTGAAGATTT |
| | TGCTACGTACTACTGTCAACAGTGGCGGTTTAGTCCCCATACGTTCGGCCAAGGGACCAAGG |
| | TGGAAATCAAACGG (SEQ ID NO: 417) |
| ABT1-121 | GACATCCAGATGACCCAGTCTCCATCCTCCCTGTCTGCATCTGTAGGAGACCGTGTCACCAT |
| | CACTTGCCGGGCAAGTCAGCCGATTTATACTGAGTTATCTTGGTATCAGCAGAAACCAGGGA |
| | AAGCCCCTAAGCTCCTGATCTATGGTTCGTCCATTTTGCAAAGTGGGGTCCCATCACGTTTC |
| | AGTGGCAGTGGATCTGGGACAGATTTCACTCTCACCATCAGCAGTCTGCAACCTGAAGATTT |
| | TGCTACGTACTACTGTCAACAGTTTGCGTATCATCCTGTGACGTTCGGCCAAGGGACCAAGG |
| | TGGAAATCAAACGG (SEQ ID NO: 418) |
| ABT1-122 | GACATCCAGATGACCCAGTCTCCATCCTCCCTGTCTGCATCTGTAGGAGACCGTGTCACCAT |
| | CACTTGCCGGGCAAGTCAGCCGATTTGGACTGAGTTAAATTGGTATCAGCAGAAACCAGGGA |
| | AAGCCCCTAAGCTCCTGATCTATGGGTCGTCCTCGTTGCAAAGTGGGGTCCCATCACGTTTC |
| | AGTGGCAGTGGATCTGGGACAGATTTCACTCTCACCATCAGCAGTCTGCAACCTGAAGATTT |
| | TGCTACGTACTACTGTCAACAGTTTGCTTATTTTCCTGCTACGTTCGGCCAAGGGACCAAGG |
| | TGGAAATCAAACGG (SEQ ID NO: 419) |
| ABT1-122- | GACATCCAGATGACCCAGTCTCCATCCTCCCTGTCTGCATCTGTAGGAGACCGTGTCACCAT |
| 18 | CACTTGCCGGGCAAGTCAGCCGATTTGGACTGAGTTAAATTGGTATCAGCAGAAACCAGGGA |
| | AAGCCCCTAAGCTCCTGGTCTATGGGTCGTCCTCGTTGCAAAGTGGGGTCCCATCACGTTTC |
| | AGTGGCAGTGGATCTGGGACAGATTTCACTCTCACCATCAGCAGTCTGCAACCTGAAGATTT |
| | TGCTACGTACTACTGTCAACAGTTTGCTTATTTTCCTGCTACGTTCGGCCAAGGGACCAAGG |
| | TGGAAATCAAACGG (SEQ ID NO: 420) |
| ABT1-122- | GACATCCAGATGACCCAGTCTCCATCCTCCCTGTCTGCATCTGTAGGAGACCGTGTCACCAT |
| 21 | CACATGCCGGGCAAGTCAGCCGATTTGGACTGAGTTAAATTGGTATCAGCAGAAACCAGGGA |
| | AAGCCCCTAAGCTCCTGATCTATGGGTCGTCCTCGTTGCAAAGTGGGGTCCCAACACGTTTC |
| | AGTGGCAGTGGATCTGGGACAGATTTCACTCTCACCATCAGCAGTCTGCAACCTGAAGATTT |
| | TGCTACGTACTACTGTCAACAGTTTGCTTATTTTCCTGCTACGTTCGGCCAAGGGACCAAGG |
| | TGGAAATCAAACGG (SEQ ID NO: 421) |
| ABT1-122- | GACATCCAGATGACCCAGTCTCCATCCTCCCTGTCTGCATCTGTAGGAGACCGTGTCACCAT |
| 511 | CACTTGCCGGGCAAGTCAGCCGATTTGGACTGAGTTAAATTGGTATCAGCAGAAACCAGGGA |
| | AAGCCCCTAAGCTCCTGATCTATGGGTCGTCCTCGTTGCAAAGAGGGGTCCCATCACGTTTC |
| | AGTGGCAGTGGATCTGGGACAGATTTCACTCTCACCATCAGCAGTCTGCAACCTGAAGATTT |
| | TGCTACGTACTACTGTAAACAGTTTGCTTATTTTCCTGCTACGTTCGGCCAAGGGACCAAGG |
| | TGGAAATCAAACGG (SEQ ID NO: 422) |
| ABT1-122- | GACATCCAGATGACCCAGTCTCCATCCTCCCTGTCTGCATCTGTAGGAGACCGTGTCGCCAT |
| 750X | CACTTGCTCGGCATCTCAGCATATTTGGACTGAGATATCTTGGTATCAGCAGAAACCAGGGA |
| | AAGCCCCTAAGCTCCTGATCTATGGCTCGGCCTCGCGGCAAAAAGGGGTCCCATCACGTTTC |
| | AGTGGCAGTGGATCTGGGACAGATTTCACTCTCACCATCAGCAGTCTGCAACCTGAAGATTT |
| | TGCTACGTACTACTGTAAACAGTTTGCTTATTTTCCTAATACGTTCGGCCAAGGGACCAAGG |
| | TGGAAATCAAACGGG (SEQ ID NO: 423) |
| ABT1-123 | GACATCCAGATGACCCAGTCTCCATCCTCCCTGTCTGCATCTGTAGGAGACCGTGTCACCAT |
| | CACTTGCCGGGCAAGTCAGAGCATTTGGACGGAGTTAAAGTGGTACCAGCAGAAACCAGGGA |
| | AAGCCCCTAAGCTCCTGATCTATGGTGCATCCCTGTTGCAAAGTGGGGTCCCATCACGTTTC |
| | AGTGGCAGTGGATCTGGGACAGATTTCACTCTCACCATCAGCAGTCTGCAACCTGAAGATTT |
| | TGCTACGTACTACTGTCAACAGTTTGCTTATCATCCTCATACGTTCGGCCAAGGGACCAAGG |
| | TGGAAATCAAACGG (SEQ ID NO: 424) |
| ABT1-124 | GACATCCAGATGACCCAGTCTCCATCCTCCCTGTCTGCATCTGTAGGAGACCGTGTCACCAT |
| | CACTTGCCGGGCAAGTCAGTCGATTGAGGGTAATTTACGGTGGTACCAGCAGAAACCAGGGA |
| | AAGCCCCTAAGCTCCTGATCTATAATGTGTCCCTTTTGCAAAGTGGGGTCCCATCACGTTTC |
| | AGTGGCAGTGGATCTGGGACAGATTTCACTCTCACCATCCGCAGTCTGCAACCTGAAGATTT |
| | TGCTACGTACTACTGTCAACAGGGGTATCGTTATCCTCCTACGTTCGGCCAAGGGACCAAGG |
| | TGGAAATCAAACGG (SEQ ID NO: 425) |
| ABT1-125 | GACATCCAGATGACCCAGTCTCCATCCTCCCTGTCTGCATCTGTAGGAGACCGTGTCACCAT |
| | CACTTGCCGGGCAAGTCAGTCGATTCAGAAGTTTTTAAATTGGTACCAGCAGAAACCAGGGA |
| | AAGCCCCTAAGCTCCTGATCTATCGGGGTTCCGGGTTGCAAAGTGGGGTCCCAACACGTTTC |
| | AGTGGCAGTGGATCTGGGACAGATTTCACTCTCACCATCAGCAGTCTGCAACCTGAGGATTT |
| | TGCTACGTACTACTGTCAACAGGAGTATCGGATGCCTCTTACGTTCGGCCAAGGGACCAAGG |
| | TGGAAATCAAACGG (SEQ ID NO: 426) |
| ABT1-126 | GACATCCAGATGACCCAGTCTCCATCCTCCCTGTCTGCATCTGTAGGAGACCGTGTCACCAT |
| | CACTTGCCGGGCAAGTCAGTCTATTTATAAGTATTTAAGTTGGTACCAGCAGAAACCAGGGA |
| | AAGCCCCTATGCTCCTGATCTATAGGGGGTCCCATTTGCAAAGTGGGGTCCCATCACGTTTC |
| | AGTGGCAGTGGATCTGGGACAGATTTCACTCTCACCATCAGCAGTCTGCAACCTGAAGATTT |
| | TGCTACGTACTACTGTCAACAGTATGCGTTTTCGCCTTTTACGTTCGGCCAAGGGACCAAGG |
| | TAGAAATCAAACGG (SEQ ID NO: 427) |
| ABT1-127 | GACATCCAGATGACCCAGTCTCCATCCTCCCTGTCTGCATCTGTAGGAGACCGTGTCACCAT |
| | CACTTGCCGGGCAAGTCAGAGTATTAGGTATTATTTAAATTGGTATCAGCAGAAACCAGGGA |
| | AAGCCCCTAAGCTCCTGATCTATTGGGATTCCAAGTTGCAAAGTGGGGTCCCATCACGTTTC |
| | AGTAGCAGTGGATCTGGGACAGATTTCACTCTCACCATCAGCAGTCTGCAACCTGAAGATTT |
| | TGCTACGTACTACTGTCAACAGACTGCGTCGGCTCCTTTTACGTTCGGCCAAGGGACCAAGG |
| | TGGAAATCAAACGG (SEQ ID NO: 428) |
| ABT1-128 | GACATCCAGATGACCCAGTCTCCATCCTCCCTGTCTGCATCTGTAGGAGACCGTGTCACCAT |
| | CACTTGCCGGGCAAGTCAGCCTATTAGGGAGTTTTTACATTGGTATCAGCAGAAACCAGGGA |
| | AAGCCCCTAAGCTCCTGATCTATAGGTCTTCCCGTTTGCAAAGTGGGGTCCCATCACGTTTC |
| | AGTGGCAGTGGATCTGGGACAGATTTCACTCTCACCATCAGCAGTCTGCAACCTGAAGATTT |
| | TGCTACGTACTACTGTCAACAGGAGTATAGGTATCCTCTTACGTTCGGCCAAGGGACCAAGG |
| | TGGAAATCAAACGG (SEQ ID NO: 429) |
| ABT1-129 | GACATCCAGATGACCCAGTCTCCATCCTCCCTGTCTGCATCTGTAGGGGACAGTGTCGCCAT |
| | CACTTGCCGGGCAAGTCAGCCGATTGGGGCGTTTTTATCTTGGTACCAGCAGAAACCAGGGA |
| | AAGCCCCTAAGCTCCTGATCTATGCGATTTCCAAGTTGCAAAGTGGGGTCCCATCACGTTTC |
| | AGTGGCAGTGGATCTGGGACAGATTTCACTCTCACCATCAGCAGTCTGCAACCTGAAGATTT |
| | TGCTACGTACTACTGTCAACAGCAGATGATTTCGCCTCGTACGTTCGGCCAAGGGACCAAGG |
| | TGGAAATCAAACGG (SEQ ID NO: 430) |
| ABT1-130 | GACATCCAGATGACCCAGTCTCCATCCTCCCTGTCTGCATCTGTAGGAGACCGTGTCACCAT |
| | CACTTGCCGGGCAAGTCAGGAGATTGGTTTGTGGTTATCTTGGTACCAGCAGAAATCAGGGA |
| | AAGCCCCTAAGCTCCTGATCTATCGGCATTCCAGTTCGCAAAGTGGGGTTCCATCACGTTTC |
| | AGTGGCAGTGGATCTGGGACAGATTTCACTCTCACCATCAGCAGTCTGCAACCTGAAGATTT |
| | TGCTACGTACTACTGTCAACAGACTTATAAGGCGCCTTTTACGTTCGGCCAAGGGACCAAGG |
| | TGGAAATCAAACGG (SEQ ID NO: 431) |
| ABT1-131 | GACATCCAGATGACCCAGTCTCCATCTTCCCTGTCTGCATCTGTAGGAGACCGTGTCACCAT |
| | CACTTGCCGGGCAAGTCAGAGGATTAATGGGAATTTACGTTGGTACCAGCAGAAACCAGGGA |
| | AAGCCCCTAAGCTCCTGATCTATTCTGTTTCCCAGTTGCAAAGTGGGGTCCCATCACGTTTC |
| | AGTGGCAGTGGATCTGGGACAGATTTCACTCTCACCATCAGCAGTCTGCAACCTGAAGATTT |
| | TGCTACGTACTACTGTCAACAGGGTTATGATTGGCCTCCTACGTTCGGCCAAGGGACCAAGG |
| | TGGAAACCAAACGG (SEQ ID NO: 432) |
| ABT1-132 | GACATCCAGATGACCCAGTCTCCATCCTCCCTGTCTGCATCTGTAGGAGACCGTGTCACCAT |
| | CACTTGCCGGGCAAGTCAGAATATTGCTACGGCGTTACTTTGGTACCAGCAGAAACCAGGGA |
| | AAGCCCCTAGGCTCCTGATCTATGATTCGTCCCAGTTGCAAAGTGGGGTCCCATCACGTTTC |
| | AGTGGCAGTGGATCTGGGACAGATTTCACTCTCACCATCAGCAGTCTGCAACCTGAAGATTT |
| | TGCTACGTACTACTGTCAACAGATGTATTGGGTTCCTTTTACGTTCGGCCAAGGGACCAAGG |
| | TGGAAATCAAACGG (SEQ ID NO: 433) |
| ABT1-133 | GACATCCAGATGACCCAGTCTCCATCCTCCCTGTCTGCATCTGTAGGAGACCGTGTCACCAT |
| | CACTTGCCGGGCAAGTCAGTGGATTCAGAAGCAGTTAGCGTGGTATCAGCAGAAACCAGGGA |
| | AAGCCCCTAAGCTCCTGATCTATTCTTCGTCCTATTTGCAAAGTGGGGTCCCATCACGTTTC |
| | AGTGGCAGTGGATCTGGGACAGATTTCACTCTCACCATCAGCAGTCTGCAACCTGAAGATTT |
| | TGCTACGTACTACTGTCAACAGACGATGACTGCTCCTTTTACGTTCGGCCAAGGGACCAAGG |
| | TGGAAATCAAACGG (SEQ ID NO: 434) |
| ABT1-134 | GACATCCAGATGACCCAGTCTCCATCCTCCCTGTCTGCATCTGTAGGAGACCGTGTCACCAT |
| | CACTTGCCGGGCAAGTCAGCATATTTATGATATGTTATCGTGGTACCAGCTGAAACCAGGGA |
| | AAGCCCCTAAGCTCCTGATCTATCGTACGTCCCTTTTGCAAAGTGGGGTCCCATCACGTTTC |
| | AGTGGCAGTGGATCTGGGACAGATTTCACTCTTACCATCAGCAGTCTGCAACCTGAAGATTT |
| | TGCTACGTACTACTGTCAACAGAATCATCGGAGGCCTCATAGGTTCGGCCAAGGGACCAAGG |
| | TGGAAATCAAACGG (SEQ ID NO: 435) |
| ABT1-135 | GACATCCAGATGACCCAGTCTCCATCCTCCCTGTCTGCATCTGTAGGAGACCGTGTCACCAT |
| | CACTTGCCGGGCAAGTCAGTATATTGGTCGGAAGTTAAGGTGGTATCAGCAGAAACCAGGGA |
| | AAGCCCTTAAGCTCCTGATCTATCGGACGTCCCGTTTGCAAAGTGGGGTCCCATCACGTTTC |
| | AGTGGCAGTGGATCTGGGACAGATTTCACTCTCACCATCAGCAGTCTGCAACCTGAAGATTT |
| | TGCTACGTACTACTGTCAACAGACGGGGCAGCATCCTCATACGTTCGGCCAAGGGACCAAGG |
| | TGGAAATCAAACGG (SEQ ID NO: 436) |
| ABT1-136 | GACATCCAGATGACCCAGTCTCCATCCTCCCTGTCTGCATCTGTAGGAGACCGTGTCACCAT |
| | CACTTGCCGGGCAAGTCAGGATATTGCGAATAATTTAGTGTGGTACCAGCAGAAACCAGGGA |
| | AAGCCCCTAAGCTCCTGATCTATAGGCATTCCTTTTTGCAAAGTGGGGTCCCATCACGTTTC |
| | AGTGGCAGTGGATCTGGGACAGATTTCACTCTCACCATCAGCAGTCTGCAACCTGAAGATTT |
| | TGCTACGTACTACTGTCAACAGATGCAGCAGGCTCCTTTTACGTCCGGCCAAGGGACCAAGG |
| | TGGAAATCAAACGG (SEQ ID NO: 437) |
| ABT1-141 | GACATCCAGATGACCCAGTCTCCATCCTCCCTGTCTGCATCTGTAGGAGACCGTGTCACCAT |
| | CACTTGCCGGGCAAGTCAGTGGATTCAGAAGCAGTTAGCGTGGTATCAGCAGAAACCAGGGA |
| | AAGCCCCTAAGCTCCTGATCTATTCTTCGTCCTATTTGCAAAGTGGGGTCCCATCACGTTTC |
| | AGTGGCAGTGGATCTGGGACAGATTTCACTCTCACCATCAGCAGTCTGCAACCTGAAGATTT |
| | TGCTACGTACTACTGTCAACAGCATCTGAGGGTGCCTTTTACGTTCGGCCAAGGGACCAAGG |
| | TGGAAATCAAACGG (SEQ ID NO: 438) |
| ABT1-141-1 | GACATCCAGATGACCCAGTCTCCATCCTCCCTGTCTGCATCTGTAGGAGACCGTGTCACCAT |
| | CACTTGCCGGGCAAGTCAGTGGATTCAGAAGCAGTTAGCGTGGTACCAGCAGAAACCAGGGA |
| | AAGCCCCTAAGCTCCTGATCTATAGTGGTTCCTGGTTGCAAAGTGGGGTCCCATCACGTTTC |
| | AGTGGCAGTGGATCTGGGACAGATTTCACTCTCACCATCAGCAGTCTGCAACCTGAAGATTT |
| | TGCTACGTACTACTGTCAACAGCATCTGAGGGTGCCTTTTACGCTCGGCCAAGGGACCAAGG |
| | TGGAAATCAAACGG (SEQ ID NO: 439) |
| ABT1-141-2 | GACATCCAGATGACCCAGTCTCCATCCTCCCTGTCTGCATCTGTAGGAGACCGTGTCACCAT |
| | CACTTGCCGGGCAAGTCAGTGGATACAGAAGCAGTTAGCGTGGTACCAGCAGAAACCAGGGA |
| | AAGCCCCTAAGCTCCTGATCTATAGTGCGTCCTGGTTGCAAAGTGGGGTCCCATCACGTTTC |
| | AGTGGCAGTGGATCTGGGACAGATTTCACTCTCACCATCAGCAGTCTGCAACCTGAAGATTT |
| | TGCTACGTACTACTGTCAACAGCATCTGAGGGTGCCTTTTACGCTCGGCCAAGGGACCAAGG |
| | TGGAAATCAAACGG (SEQ ID NO: 440) |
| ABT1-141-3 | GACATCCAGATGACCCAGTCTCCATCCTCCCTGTCTGCATCTGTAGGAGACCGTGTCACCAT |
| | CACTTGCCGGGCAAGTCAGTGGATTCAGAAGCAGTTAGCGTGGTACCAGCAGAAACCAGGGA |
| | AAACCCCTAAGCTCCTGATCTATAGTCAGTCCCATTTGCAAAGTGGGGTCCCATCACGTTTC |
| | AGTGGCAGTGGATCTGGGACAGATTTCACTCTCACCATCAGCAGTCTGCAACCTGAAGATTT |
| | TGCTACGTACTACTGTCAACAGCATCTGAGGGTGCCTTTTACGTTCGGCCAAGGGACCAAGG |
| | TGGAAATCAAACGG (SEQ ID NO: 441) |
| ABT1-141-6 | GACATCCAGATGACCCAGTCTCCATCCTCCCTGTCTGCATCCGTAGGAGACCGTGTCACCAT |
| | CACTTGCCGGGCAAGTCAGTGGATTCAGAAGCAGTTAGCGTGGTATCAGCAGAAACCAGGGA |
| | AAGCCCCTAAGCTCCTGATCTATTCTTCGTCCTATTTGCAAAGTGGGGTCCCATCACGTTTC |
| | AGTGGCAGTGGATCTGGGACAGATTTCACTCTCACCATCAGCAGTCTGCAACCTGAAGATTT |
| | TGCTACGTACTACTGTCTACAGCATCTGAGGGTGCCTTTTACGTTCGGCCAAGGGACCAAGG |
| | TGGAAATCAAACGG (SEQ ID NO: 442) |
| ABT1-141-7 | GACATCCAGATGACCCAGTCTCCATCCTCCCTGTCTGCATCTGTAGGAGACCGTATCACCAT |
| | CACTTGCCGGGCAAGTCAGTGGATTCAGAAGCAGTTAGCGTGGTACCAGCTGAAACCAGGGA |
| | AAGCCCCTAAGCTCCTGATCTATTCTTCGTCCTATTTGCAAAGTGGGGTCCCATCACGTTTC |
| | AGTGGCAGTGGATCTGGGACAGATTTCACTCTCACCATCAGCAGTCTGCAACCTGAAGATTT |
| | TGCTACGTACTACTGTCAACAGCATCTGAGGGTGCCTTTTACGTTCGGCCAAGGGACCAAGG |
| | TGGAAATCAAACGG (SEQ ID NO: 443) |
| ABT1-141-8 | GACATCCAGATGACCCAGTCTCCATCCTCCCTGTCTGCATCTGTAGGAGACCGTGTCACCAT |
| | CACTTGCCGGGCAAGTCAGTGGATTCAGAAGCAGTTAGCGTGGTACCAGCTGAAACCAGGGA |
| | AAGCCCCTAAGCTCCTGATCTATAGTTCTTCCTGGTTGCAAAGTGGGGTCCCATCACGTTTC |
| | AGTGGCAGTGGATCTGGGACAGATTTCACTCTCACCATCAGCAGTCTGCAACCTGAAGATTT |
| | TGCTACGTACTACTGTCAACAGCATCTGAGGGTGCCTTTTACGTTCGGCCAAGGGACCAAGG |
| | TGGAAATCAAACGG (SEQ ID NO: 444) |
| ABT1-141-9 | GACATCCAGGTGACCCAGTCTCCATCCTCCCTGTCTGCATCTGTAGGAGACCGTGTCACCAT |
| | CACTTGCCGGGCAAGTCAGTGGATTCAGAAGCAGTTAGCGTGGTACCAGCAGAAACCAGGGA |
| | AAGCCCCTAAGCTCCTGATCTATTCTTCTTCCTGGTTGCAAAGTGGGGTCCCATCACGTTTC |
| | AGTGGCAGTGGATCTGGGACAGATTTCACTCTCACCATCAGCAGTCTGCAACCTGAAGATTT |
| | TGCTACGTACTACTGTCAACAGCATCTGAGGGTGCCTTTTACGTTCGGCCAAGGGACCAAGG |
| | TGGAAATCAAACGG (SEQ ID NO: 445) |
| ABT1-141- | GACATCCAGATGACCCAGTCTCCATCCTCCCTGTCTGCATCTGTAGGAGACCGTGTCACCAT |
| 10 | CACTTGCCGGGCAAGTCAGTGGATTCAGAAGCAGTTAGCGTGGTATCAGCAGAAACCAGGGA |
| | AAGCCCCTAAGCTCCTGATCTATTCTTCGTCCTATTTGCAAAGTGGGGTCCCATCACGTTTC |
| | AGTGGCAGTGGATCTGGGACAGATTTCACTCTCACCATCAGCAGTCTGCAACCTGAAGATTT |
| | TGCTACGTACTACTGTCAACAGTCGCTTCGGGTGCCCTTTACGTTCGGCCAAGGGACCAAGG |
| | TGGAAATCAAACGG (SEQ ID NO: 446) |
| ABT1-141- | GACATCCAGATGACCCAGTCTCCATCCTCCCTGTCTGCATCTGTAGGAGACCGTGTCACCAT |
| 11 | CACTTGCCGGGCAAGTCAGTGGATTCAGAAGCAGTTAGCGTGGTATCAGCAGAAACCAGGGA |
| | AAGCCCCTAAGCTCCTGATCTATTCTTCGTCCTATTTGCAAAGTGGGGTCCCATCACGTTTC |
| | AGTGGCAGTGGATCTGGGACAGATTTCACTCTCACCATCAGCAGTCTGCAACCTGAAGATTT |
| | TGCTACGTACTACTGTCAACAGTGGATGAGTCCTCCTCGTACGTTCGGCCAAGGGACCAAGG |
| | TGGAAATCAAACGG (SEQ ID NO: 447) |
| ABT1-141- | GACATCCAGATGACCCAGTCTCCATCCTCCCTGTCTGCATCTGTAGGAGACCGTGTCACCAT |
| 12 | CACTTGCCGGGCAAGTCAGTGGATTCAGAAGCAGTTAGCGTGGTATCAGCAGAAACCAGGGA |
| | AAGCCCCTAAGCTCCTGATCTATTCTTCGTCCTATTTGCAAAGTGGGGTCCCATCACGTTTC |
| | AGTGGCAGTGGATCTGGGACAGATTTCACTCTCACCATCAGCAGTCTGCAACCTGAAGATTT |
| | TGCTACGTACTACTGTCAACAGCATCTGAGGGTGCCTTTTACGATCGGCCAAGGGACCAAGG |
| | TGGAAATCAAACGG (SEQ ID NO: 448) |
| ABT1-141- | GACATCCAGATGACCCAGTCTCCATCCTCCCTGTCTGCATCTGTAGGAGACCGTGTCACCAT |
| 13 | CACTTGCCGGGCAAGTCAGTGGATTCAGAAGCAGTTAGCGTGGTATCAGCAGAAACCAGGGA |
| | AAGCCCCTAAGCTCCTGATCTATTCTTCGTCCTATTTGCAAAGTGGGGTCCCATCACGTTTC |
| | AGTGGCAGTGGATCTGGGACAGATTTCACTCTCACCATCAGCAGTCTGCAACCTGAAGATTT |
| | TGCTACGTACTACTGTCAACAGCATTTGAGGACTCCTCCGACGTTCGGCCAAGGGACCAAGG |
| | TGGAAATCAAACGG (SEQ ID NO: 449) |
| ABT1-141- | GATATTCAGATGACCCAGAGCCCGAGCAGCCTGAGCGCGAGCGTGGGCGATCGTGTGACCAT |
| 14 | TACCTGCCGTGCGAGCCAGTGGATTCAGAAACAGCTGGCGTGGTATCAGCAGAAACCGGGCA |
| | AAGCGCCGCGTCTGCTGATTTATAGCAGCAGCTATCTGCAGAGCGGCGTGCCGAGCCGTTTT |
| | AGCGGCAGCGGCAGCGGCACCGATTTTACCCTGACCATTAGCAGCCTGCAGCCGGAAGATTT |
| | TGCGACCTATTATTGCCAGCAGAACCTGAGCGTGCCGTTTACCTTTGGCCAGGGCACCAAAG |
| | TGGAAATTAAACGT (SEQ ID NO: 450) |
| ABT1-141- | GACATCCAGATGACCCAGTCTCCACCCTCCCTGTCTGCATCTGTAGGAGACCGTGTCACCAT |
| 15 | CACTTGCCGGGCAAGTCAGTGGATTCAGAAGCAGTTAGCGTGGTATCAGCAGAAACCAGGGA |
| | AAGCCCCTAAGCTCCTGATCTATTCTTCGTCCTATTTGCAAAGTGGGGTCCCATCACGTTTC |
| | AGTGGCAGTGGATCTGGGACAGATTTCACTCTCACCATCAGCAGTCTGCAACCTGAAGATTT |
| | TGCTACGTACTACTGTCAACAGCATCTGAGGGTGCCTTTTACGTTCGGCCAAGGGACCAAGG |
| | TGGAAATCAAACGG (SEQ ID NO: 451) |
| ABT1-141- | GACATCCAGATGACCCAGTCTCCATCCTCCCTGTCTGCATCTGTAGGAGACCGTGTCGCCAT |
| 16 | CACTTGCCGGGCAAGTCAGTGGATTCAGAAGCAGTTAGCGTGGTATCAGCAGAAACCAGGGA |
| | AAGCCCCTAAGCTCCTGATCTATTCTTCGTCCTATTTGCAAAGTGGGGTCCCATCACGTTTC |
| | AGTGGCAGTGGATCTGGGACAGATTTCACTCTCACCATCAGCAGTCTGCAACCTGAAGATTT |
| | TGCTACGTACTACTGTCAACATCATCTGAGGGTGCCTTTTACGTTCGGCCAAGGGACCAAGG |
| | TGGAAATCAAACGG (SEQ ID NO: 452) |
| ABT1-141- | GACATCCAGATGACCCAGTCTCCATCCTCCCTGTCTGCATCTGTAGGAGACCGTGTCACCAT |
| 17 | CACTTGCCGGGCAAGTCAGTGGATTCAGAAGCAGTTAGCGTGGTATCAGCTGAAACCAGGGA |
| | AAGCCCCTAAGCTCCTGATCTATTCTTCGTCCTATTTGCAAAGTGGGGTCCCATCACGTTTC |
| | AGTGGCAGTGGATCTGGGACAGATTTCACTCTCACCATCAGCAGTCTGCAACCTGAAGATTT |
| | TGCTACGTACTACTGTCAACAGCATCTGAGGGTGCCTTTTACGTTCGGCCAAGGGACCAAGG |
| | TGGAAATCAAACGG (SEQ ID NO: 453) |
| ABT1-141- | GACATCCAGATGACCCAGTCTCCATCCTCCCTGTCTGCATCTGTAGGAGACCGTGTCACCAT |
| 18 | CACTTGCCGGGCAAGTCAGTGGATTCAGAAGCAGTTAGCGTGGTATCAGCAGAAACCAGGGA |
| | AAGTCCCTAAGCTCCTGATCTATTCTTCGTCCTATTTGCAAAGTGGGGTCCCATCACGTTTC |
| | AGTGGCAGTGGATCTGGGACAGATTTCACTCTCACCATCAGCAGTCTGCAACCTGAAGATTT |
| | TGCTACGTACTACTGTCAACAGCATCTGAGGGTGCCTTTTACGTTCGGCCAAGGGACCAAGG |
| | TGGAAATCAAACGG (SEQ ID NO: 454) |
| ABT1-141- | GACATCCAGATGACCCAGTCTCCATCCTCCCTGTCTGCATCTGTAGGAGACCGTGTCACCAT |
| 19 | CACTTGCCGGGCAAGTCAGTGGATTCAGAAGCAGTTAGCGTGGTACCAGCAGAAACCAGGGA |
| | AAGCCCCTAAGCTCCTGATCTATTCGAGTTCCTGGTTGCAAAGTGGGGTCCGATCACGTTTC |
| | AGTGGCAGTGGATCTGGGACAGATTTCACTCTCACCATCAGCAGTCTGCAACCTGAAGATTT |
| | TGCTACGTACTACTGTCAACAGCATCTGAGGGTGCCTTTTACGTTCGGCCAAGGGACCAAGG |
| | TGGAAATCAAACGG (SEQ ID NO: 455) |
| ABT1-141- | GACATCCAGATGACCCAGTCTCCATCCTCCCTGTCTGCATCTGTAGGAGACCGTGTCACCAT |
| 20 | CACTTGCCGGGCAAGTCAGTGGATTCAGAAGCAGTTAGCGTGGTACCAGCAGAAACCAGGGA |
| | AAGCCCCTAAGCTCCTGATCTATTCGGCTTCCTGGTTGCAAAGTGGGGTCCCATCACGTTTC |
| | AGTGGCAGTGGATCTGGGACAGATTTCACTCTCACCATCAGCAGTCTGCAACCTGAAGATTT |
| | TGCTACGTACTACTGTCAACAGCATCTGAGGGTGCCTTTTACGTTCGGCCAAGGGACCAAGG |
| | TGGAAATCAAACGG (SEQ ID NO: 456) |
| ABT1-141- | GACATCCAGATGACCCAGTCTCCATCCTCCCTGTCTGCATCTGTAGGAGACCGTGTCACCAT |
| 21 | CACTTGCCGGGCAAGTCAGTGGATTCAGAAGCAGTTAGCGTGGTATCAGCAGAAACCAGGGA |
| | AAGCCCCTAAGCTCCTGATCTATTCTTCGTCCTATTTGCAAAGTGGGGTCCCATCACGTTTC |
| | AGTGGCAGTGGATCTGGGACAGATTTCACTCTCACCATCAGCAGTCTGCAACCTGAAGATTT |
| | TGCTACGTACTACTGTCAACAGCAGATGTCGTCTCCTCGTACGTTCGGCCAAGGGACCAAGG |
| | TGGAAATCAAACGG (SEQ ID NO: 457) |
| ABT1-141- | GACATCCAGATGACCCAGTCTCCATCCTCCCTGTCTGCATCTGTAGGAGACCGTGTCACCAT |
| 22 | CACTTGCCGGGCAAGTCAGTGGATTCAGAAGCAGTTAGCGTGGTATCAGCAGAAACCAGGGA |
| | AAGCCCCTAAGCTCCTGATCTATTCTTCGTCCTATTTGCAAAGTGGGGTCCCATCACGTTTC |
| | AGTGGCAGTGGATCTGGGACAGATTTCACTCTCACCATCAGCAGTCTGCAACCTGAAGATTT |
| | TGCTACGTACTACTGTCAACAGCAGATGGCTCCTCCTCGTACGTTCGGCCAAGGGACCAAGG |
| | TGGAAATCAAACGG (SEQ ID NO: 458) |
| ABT1-141- | GACATCCAGATGACCCAGTCTCCATCCTCCCTGTCTGCATCTGTAGGAGACCGTGTCACCAT |
| 23 | CACTTGCCGGGCAAGTCAGTGGATTCAGAAGCAGTTAGCGTGGTATCAGCAGAAACCAGGGA |
| | AAGCCCCTAAGCTCCTGATCTATTCTTCGTCCTATTTGCAAAGTGGGGTCCCATCACGTTTC |
| | AGTGGCAGTGGATCTGGGACAGATTTCACTCTCACCATCAGCAGTCTGCAACCTGAAGATTT |
| | TGCTACGTACTACTGTCAACAGCAGATGCAGCCTCCTCGTACGTTCGGCCAAGGGACCAAGG |
| | TGGAAATCAAACGG (SEQ ID NO: 459) |
| ABT1-141- | GACATCCAGATGACCCAGTCTCCATCCTCCCTGTCTGCATCTGTAGGAGACCGTGTCACCAT |
| 24 | CACTTGCCGGGCAAGTCAGTGGATTCAGAAGCAGTTAGCGTGGTATCAGCAGAAACCAGGGA |
| | AAGCCCCTAAGCTCCTGATCTATTCTTCGTCCTATTTGCAAAGTGGGGTCCCATCACGTTTC |
| | AGTGGCAGTGGATCTGGGACAGATTTCACTCTCACCATCAGCAGTCTGCAACCTGAAGACTT |
| | TGCTACGTACTACTGTCAACAGCATCTGAGGGTGCCTCCGACGTTCGGCCAAGGGACCAAGG |
| | TGGAAATCAAACGG (SEQ ID NO: 460) |
| ABT1-141- | GACATCCAGATGACCCAGTCTCCATCCTCCCTGTCTGCATCTGTAGGAGACCGTGTCACCAT |
| 25 | CACTTGCCGGGCAAGTCAGTGGATTCAGAAGCAGTTAGCGTGGTATCAGCAGAAACCAGGGA |
| | AAGCCCCTAAGCTCCTGATCTATTCTTCGTCCTATTTGCAAAGTGGGGTCCCATCACGTTTC |
| | AGTGGCAGTGGATCTGGGACAGATTTCACTCTCACCATCAGCAGTCTGCAACCTGAAGATTT |
| | TGCTACGTACTACTGTCAACAGCATCTTCGTGTTCCTATGACGTTCGGCCAAGGGACCAAGG |
| | TGGAAATCAAACGG (SEQ ID NO: 461) |
| ABT1-141- | GACATCCAGATGACCCAGTCTCCATCCTCCCTGTCTGCATCTGTAGGAGACCGTGTCACCAT |
| 27 | CACTTGCCGGGCAAGTCAGTGGATTCAGAAGCAGTTAGCGTGGTATCAGCAGAAACCAGGGA |
| | AAGCCCCTAAGCTCCTGATCTATTCTTCGTCCTATTTGCAAAGTGGGGTCCCATCACGTTTC |
| | AGTGGCAGTGGATCTGGGACAGATTTCACTCTCACCATCAGCAGTCTGCAACCTGAAGATTT |
| | TGCTACGTACTACTGTCAACAGGGTCTTAGGCAGCCTATGACTTTCGGCCAAGGGACCAAGG |
| | TGGAAATCAAACGG (SEQ ID NO: 462) |
| ABT1-141- | GACATCCAGATGACCCAGTCTCCATCCTCCCTGTCTGCATCTGTAGGAGACCGTGTCACCAT |
| 28 | CACTTGCCGGGCAAGTCAGTGGATTCAGAAGCAGTTAGCGTGGTATCAGCAGAAACCAGGGA |
| | AAGCCCCTAAGCTCCTGATCTATTCTTCGTCCTATTTGCAAAGTGGGGTCCCATCACGTTTC |
| | AGTGGCAGTGGATCTGGGACAGATTTCACTCTCACCATCAGCAGTCTGCAACCTGAAGATTT |
| | TGCTACGTACTACTGTCAACAGCATCTGAGGGTGCCTTTTACGCTCGGCCAAGGGACCAAGG |
| | TGGAAATCAAACGG (SEQ ID NO: 463) |
| ABT1-141- | GACATCCAGGTGACCCAGTCTCCATCCTCCCTGTCTGCATCTGTAGGAGACCGTGTCACCAT |
| 29 | CACTTGCCGGGCAAGTCAGTGGATTCAGAAGCAGTTAGCGTGGTATCAGCTGAAACCAGGGA |
| | AAGCCCCTAAGCTCCTGATCTATTCTTCGTCCTATTTGCAAAGTGGGGTCCCATCACGTTTC |
| | AGTGGCAGTGGATCTGGGACAGATTTCACTCTCACCATCAGCAGTCTGCAACCTGAAGATTT |
| | TGCTACGTACTACTGTCAACAGCATCTGAGGGTGCCTTTTACGTTCGGCCAAGGGACCAAGG |
| | TGGAAATCAAACGG (SEQ ID NO: 464) |
| ABT1-141- | GACATCCAGGTGACCCAGTCTCCATCCTCCCTGTCTGCATCTGTAGGAGACCGTGTCACCAT |
| 30 | CACTTGCCGGGCAAGTCAGTGGATTCAGAAGCAGTTAGCGTGGTATCAGCAGAAACCAGGGA |
| | AAGCCCCTAAGCTCCTGATCTATTCTTCGTCCTATTTGCAAAGTGGGGTCCCATCACGTTTC |
| | AGTGGCAGTGGATCTGGGACAGATTTCACTCTCACCATCAGCAGTCTGCAACCTGAAGATTT |
| | TGCTACGTACTACTGTCAACAGCATCTTCGTGTTCCTATGACGTTCGGCCAAGGGACCAAGG |
| | TGGAAATCAAACGG (SEQ ID NO: 465) |
| ABT1-141- | GACATCCAGATGACCCAGTCTCCATCCTCCCTGTCTGCATCTGTAGGAGACCGTGTCACCAT |
| 31 | CACTTGCCGGGCAAGTCAGTGGATTCAGAAGCAGTTAGCGTGGTATCAGCAGAAACCAGGGA |
| | AAGCCCCTAAGCTCCTGATCTATTCTTCGTCCTGGTTGCAAAGTGGGGTCCCATCACGTTTC |
| | AGTGGCAGTGGATCTGGGACAGATTTCACTCTCACCATCAGCAGTCTGCAACCTGAAGATTT |
| | TGCTACGTACTACTGTCAACAGCATCTTCGTGTTCCTATGACGTTCGGCCAAGGGACCAAGG |
| | TGGAAATCAAACGG (SEQ ID NO: 466) |
| ABT1-141- | GACATCCAGATGACCCAGTCTCCATCCTCCCTGTCTGCATCTGTAGGAGACCGTATCACCAT |
| 32 | CACTTGCCGGGCAAGTCAGTGGATTCAGAAGCAGTTAGCGTGGTACCAGCTGAAACCAGGGA |
| | AAGCCCCTAAGCTCCTGATCTATTCTTCGTCCTATTTGCAAAGTGGGGTCCCATCACGTTTC |
| | AGTGGCAGTGGATCTGGGACAGATTTCACTCTCACCATCAGCAGTCTGCAACCTGAAGATTT |
| | TGCTACGTACTACTGTCAACAGCATCTGAGGGTGCCTATGACGTTCGGCCAAGGGACCAAGG |
| | TGGAAATCAAACGG (SEQ ID NO: 467) |
| ABT1-141- | GACATCCAGATGACCCAGTCTCCATCCTCCCTGTCTGCATCTGTAGGAGACCGTGTCACCAT |
| 33 | CACTTGCCGGGCAAGTCAGTGGATTCAGAAGCAGTTAGCGTGGTACCAGCTGAAACCAGGGA |
| | AAGCCCCTAAGCTCCTGATCTATAGTTCTTCCTGGTTGCAAAGTGGGGTCCCATCACGTTTC |
| | AGTGGCAGTGGATCTGGGACAGATTTCACTCTCACCATCAGCAGTCTGCAACCTGAAGATTT |
| | TGCTACGTACTACTGTCAACAGCATCTGAGGGTGCCTATGACGTTCGGCCAAGGGACCAAGG |
| | TGGAAATCAAACGG (SEQ ID NO: 468) |
| ABT1-141- | GACATCCAGACGACCCAGTCTCCATCCTCCCTGTCTGCATCTGTAGGAGACCGTGTCACCAT |
| 34 | CACTTGCCGGGCAAGTCAGTGGATTCAGAAGCAGTTAGCGTGGTATCAGCAGAAACCAGGGA |
| | AAGCCCCTAAGCTCCTGATCTATTCTTCGTCCTATTTGCAAAGTGGGGTCCCATCACGTTTC |
| | AGTGGCAGTGGATCTGGGACAGATTTCACTCTCACCATCAGCAGTCTGCAACCTGAAGATTT |
| | TGCTACGTACTACTGTCAACAGCATCTGAGGGTGCCTATGACGTTCGGCCAAGGGACCAAGG |
| | TGGAAATCAAACGG (SEQ ID NO: 469) |
| ABT1-141- | GACATCCAGATGACCCAGTCTCCATCCTCCCTGTCTGCATCTGTAGGAGACCGTGTCACCAT |
| 35 | CACTTGCCGGGCAAGTCAGTGGATTCAGAAGCAGTTAGCGTGGTATCAGCAGAAACCAGGGA |
| | AAGCCCCTAAGCTCCTGATCTATTCTGCGTCCTGGTTGCAAAGTGGGGTCCCATCACGTTTC |
| | AGTGGCAGTGGATCTGGGACAGATTTCACTCTCACCATCAGCAGTCTGCAACCTGAAGATTT |
| | TGCTACGTACTACTGTCAACAGCATCTTCGTGTTCCTATGACGTTCGGCCAAGGGACCAAGG |
| | TGGAAATCAAACGG (SEQ ID NO: 470) |
| ABT1-141- | GACCTCCAGATGACCCAGTCTCCATCCTCCCTGTCTGCATCTGTAGGAGACCGTGTCACCAT |
| 42 | CACTTGCCGGGCAAGTCAGTGGATTCAGAAGCAGTTAGCGTGGTATCAGCAGAAACCAGGGA |
| | AAGCCCCTAAGCTCCTGATCTATTCTTCGTCCTATTTGCAAAGTGGGGTCCCATCACGTTTC |
| | AGTGGCAGTGGATCTGGGACAGATTTCACTCTCACCATCAGCAGTCTGCAACCTGAAGATTT |
| | TGCTACGTACTACTGTCAACAGCATCTTCGTGTTCCTATGACGTTCGGCCAAGGGACCAAGG |
| | TGGAAATCAAACGG (SEQ ID NO: 471) |
| ABT1-141- | GACATCCAGATGACCCAGTCTCCATCCTCCCTGTCTGCATCTGTAGGAGACCGTGTCACCAT |
| 43 | CACTTGCCGGGCAAGTCAGTGGATTCAGAAGCAGTTAGCGTGGTATCAGCAGAAACCAGGGA |
| | AAGCCCCTAAGCTCCTGATCTATTCTTCGTCCTATTTGCAAAGTGGGGTCCCACCACGTTTC |
| | AGTGGCAGTGGATCTGGGACAGATTTCACTCTCACCATCAGCAGTCTGCAACCTGAAGATTT |
| | TGCTACGTACTACTGTCAACAGCATCTTCGTGTTCCTATGACGTTCGGCCAAGGGACCAAGG |
| | TGGAAATCAAACGG (SEQ ID NO: 472) |
| ABT1-141- | GACATCCAGATTACCCAGTCTCCATCATCCCTGTCTGCATCTGTAGGAGACCGTGTCACCAT |
| 44 | CACTTGCCGGGCAAGTCAGTGGATTCAGAAGCAGTTAGCGTGGTATCAGCAGAAACCAGGGA |
| | AAGCCCCTAAGCTCCTGATCTATTCTTCGTCCTATTTGCAAAGTGGGGTCCCATCACGATTC |
| | AGTGGCAGTGGATCTGGGACAGATTTCACTCTCACCATCAGCAGTCTGCAACCTGAAGATTT |
| | TGCTACGTACTACTGTCAACAGCATCTTCGTGTTCCTATGACGTTCGGCCAAGGGACCAAGG |
| | TGGAAATCAAACGG (SEQ ID NO: 473) |
| ABT1-141- | GACATCCAGATGACCCAGTCTCCATCCTCCCTGTCTGCATCTGTAGGAGACCGTGTCACCAT |
| 45 | CACTTGCCGGGCAAGTCAGTGGATTCAGAAGCAGTTAGCGTGGTATCAGCAGAAACCAGGGA |
| | AAGCCCCTAAGCTCCTGATCTATTCTTCGTCCTATTTGCAAAGTGGGGTCCCATCACGTTTC |
| | AGTGGCAGCGGATCTGGGACAGATTTCACTCTCACCATCAGTAGTCTGCAACTTGAAGATTT |
| | TGCTACGTACTACTGTCAACAGCATCTTCGTGTTCCTATGACGCTCGGCCAAGGGACCAAGG |
| | TGGAAATCAAACGG (SEQ ID NO: 474) |
| ABT1-141- | GACATCCAGATGACCCAGTCTCCATCCTCCCTGTCTGCATCTGTAGGAGACCGTGTCACCAT |
| 46 | CACTTGCCGGGCAAGTCAGTGGATTCAGAAGCAGTTAGCGTGGTATCAGCAGAAACCAGGGA |
| | AAGCCCCTAAGCTCCTGATCTATTCTTCGTCCCATTTGCAAAGTGGGGTCCCATCACGTTTC |
| | AGTGGCAGTGGATCTGGGACAGATTTCACTCTCACCATCAGCAGTCTGCAACCTGAAGATTT |
| | TGCTACGTACTACTGTCAACAGCATCTTCGTGTTCCTATGACGTTCGGCCAAGGGACCAAGG |
| | TGGTAATCAAACGG (SEQ ID NO: 475) |
| ABT1-141- | GACATCCAGATGACCCAGTCTCCATCCTCCCTGTCTGCATCTGTAGGAGACCGTGTCACCAT |
| 47 | CACTTGCCGGGCAAATCAGTGGATTCAGAAGCAGTTAGCGTGGTATCAGCAGAAACCGGGGA |
| | AAGCCCCTAAGCTCCTGATCTATTCTTCGTCCCATTTGCAAAGTGGGGTCCCATCACGTTTC |
| | AGTGGCAGTGGATCTGGGACAGATTTCACTCTCACCATCAGCAGTCTGCAACCTCAAGATTT |
| | TGCTACGTACTACTGTCAACAGCATCTTCGTGTTCCTATGACGTTCGGCCAAGGGACCAAGG |
| | TGGAAATCAAACGG (SEQ ID NO: 476) |
| ABT1-141- | GACATCCAGATGACCCAGTCTCCATCCTCCCTGTCTGCATCTGTAGGAGACCGTGTCACCAT |
| 48 | CACTTGCCGGGCAAGTCAGTGGATTCAGAAGCAGTTAGCGTGGTATCAGCAGAAACCAGGGA |
| | AAGCCCCTAAGCTCCTGATCTTTTCTTCGTCCCATTTGCAAAGTGGGGTCCCATCACGTTTC |
| | AGTGGCAGTGGATCTGGGACAGATTTCACTCTCACCATCAGCAGTCTGCAACCTGAAGATTT |
| | TGCTTCGTACTACTGTCAACAGCATCTTCGTGTTCCTATGACGTTCGGCCAAGGGACCAAGG |
| | TGGAAATCAAACGG (SEQ ID NO: 477) |
| ABT1-141- | GACATCCAGATGACCCAGTCTCCATCCTCCCTGTCTGCATCTGTAGGAGACCGTGTCACCA |
| 49 | TCACTTGCCGGGCAAGTCAGTGGATTCAGAAGCAGTTAGCGTGGTATCAGCTGAAACCAGG |
| | GAAAGCCCCTAAGCTCCTGATCTATTCTTCGTCCCATTCGCAAAGTGGGGTCCCATCACGT |
| | TTCAGTGGCAGTGGATCTGGGACAGATTTCACTCTCACCATCAGCAGTCTGCAACCTGAAG |
| | ATTTTGCTACGTACTACTGTCAACAGCATCTTCGTGTTCCTATGACGTTCGGCCAAGGGAC |
| | CAAGGTGGAAATCAAACGG (SEQ ID NO: 478) |
| ABT1-141- | GACATCCAGATGACCCAGTCTCCATCCTCCCTGTCTGCATCTGTAGGAGACCGTGTCACCAT |
| 50 | CACTTGCCGGGCAAGTCAGTGGATTCAGAAGCAGTTAGCGTGGTATCAGCAGAAACCAGGGA |
| | AAACCCCTAAGCTCCTGATCTATTCTTCGTCCTATTTGCAAAGTGGGGTCCCATCACGTTTC |
| | AGTGGCAGTGGATCTGGGACAGATTTCACTCTCACCATCAGCAGTCTGCAACCTGAAGATTT |
| | TGCTACGTACTACTGTCAACAGCATCTTCGTGTTCCTATGACGTTCGGCCAAGGGACCAATG |
| | TGGAAATCAAACGG (SEQ ID NO: 479) |
| ABT1-141- | GACATCCAGATGACCCAGTCTCCATCCTCCCTGTCTGCATCTGTAGGAGACCGTGTCACCAT |
| 51 | CACTTGCCGGGCAAGTCAGTGGATTCAGAAGCAGTTAGCGTGGTATCAGCAGAAACCAGGGA |
| | AAGTCCCTAAGCTCCTGATCTATTCTTCGTCCTATTTGCAAAGTGGGGTCCCATCACGTTTC |
| | AGTGGCAGTGGATCTGGGACAGATTTCACTCTCACCATCAGCAGTCTGGAACCTGAAGATTT |
| | TGCTACGTACTACTGTCAACAGCATCTTCGTGTTCCTATGACGTTCGGCCAAGGGACCAAGG |
| | TGGTAATCAAACGG (SEQ ID NO: 480) |
| ABT1-141- | GACATCCAGATGACCCAGTCTCCATCCTCCCTGTCTGCATCTGTAGGAGACCGTGTCACCAT |
| 52 | CACTTGCCGGGCAAATCAGTGGATTCAGAAGCAGTTAGCGTGGTATCAGCAGAAACCAGGGA |
| | AAGCCCCTAAGCTCCTGATCTATTCTTCGTCCTATTTGCAAAGTGGGGTCCCATCACGTTTC |
| | AGTGGCAGTGGATCTGGGACAGATTTCACTCTCACCATCAGCAGTCTGCAACCTGAAGATTT |
| | TGCTACGTACTACTGTCAACAGCATCTTCGTGTTCCTATGACGCTCGGCCAAGGGACCAAGG |
| | TGGAAATCAAACGG (SEQ ID NO: 481) |
| ABT1-141- | GACATCCAGATGACCCAGTCTCCATCCTCCCTGTCTGCATCTGTAGGAGACCGTGTCACCA |
| 53 | TCACTTGCCGGGCAAGTCAGTGGATTCAGAAGCAGTTAGCGTGGTATCAGCTGAAACCAGG |
| | GAAAACCCCTAAGCTCCTGATCTTTTCTTCGTCCTATTTGCAAAGTGGGGTCCCATCACGT |
| | TTCAGTGGCAGTGGATCTGGGACAGATTTCACTCTCACCATCAGCAGTCTGCAACCTGAAG |
| | ATTTTGCTACGTACTACTGTCAACAGCATCTTCGTGTTCCTATGACGTTCGGCCAAGGGAC |
| | CAAGGTGGAAATCAAACGG (SEQ ID NO: 482) |
| ABT1-141- | GACATCCAGATGACCCAGTCTCCATCCTCCCTGTCTGCATCTGTAGGAGACCGTGTCACCAT |
| 54 | CACTTGCCGGGCAAGTCAGTGGATTCAGAAGCAGTTAGCGTGGTATCAGCAGAAACCAGGGA |
| | AAGCCCCTAAGCTCCTGATCTATTCTTCGTCCCATTTGCAAAGTGGGGTCCCATCACGTTTC |
| | AGTGGCAGTGGATCTGGGACAGATTTCACTCTCACCATCAGCAGTCTGCAACCTGAAGATTT |
| | TGCTACGTACTACTGTCAACAGCATCTTCGTGTTCCTATGACGTTTGGCCAAGGGACCAAGG |
| | TGGAAATCAAACGG (SEQ ID NO: 483) |
| ABT1-141- | GACATCCAGATGACCCAGTCTCCATCCTCCCTGTCTGCATCTGTAGGAGACCGTGTCACCAT |
| 70 | CACTTGCCGGGCAAGTCAGTGGATTCAGAAGCAGTTAGCGTGGTATCAGCAGAAACCAGGGA |
| | AAGCCCCTAAGCTCCTGATCTATTCTTCGTCCCATTTGCAAAGTGGGGTCCCATCACGTTTC |
| | AGTGGCAGTGGATATGGGACAGATTTCACTCTCACCATCAGCAGTCTGCAACCAGAAGATTT |
| | TGCTACGTACTACTGTCAACAGCATCTTCGTGTTCCTATGACGTTCGGCCAAGGGACCAAGG |
| | TGGAAATCAAACGG (SEQ ID NO: 484) |
| ABT1-141- | GACATCCAGATGACCCAGTCTCCATCCTCCCTGTCTGCATCTGTAGGAGACCGTGTCACCAT |
| 75 | CACTTGCCGGGCAAATCAGTGGATTCAGAAGCAGTTAGCGTGGTATCAGCAGAAACCAGGGA |
| | AAGCCCCTAAGCTCCTGATCTATTCTTCGTCCTATTTGCAAAGTGGGGTCCCATCACGTTTC |
| | AGTGGCAGTGGATCTGGGACAGATTTCACTCTCACCATCAGCAGTCTGCAACCTGAAGATTT |
| | TGCTACGTACTACTGTCAACAGCATCTTCGTGTTCCTATGACGTTCGGCCAAGGGACCAAGG |
| | TGGAAATCAAACGG (SEQ ID NO: 485) |
| ABT1-141- | GACATCCAGATGACCCAGTCTCCATCCTCCCTGTCTGCATCTGTAGGAGACCGTGTCACCAT |
| 76 | CACTTGCCGGGCAAATCAGTGGATTCAGAAGCAGTTAGCGTGGTATCAGCAGAAACCGGGGA |
| | AAGCCCCTAAGCTCCTGATCTATTCTTCGTCCCATTTGCAAAGTGGGGTCCCATCACGTTTC |
| | AGTGGCAGTGGATCTGGGACAGATTTCACTCTCACCATCAGCAGTCTGCAACCTGAAGATTT |
| | TGCTACGTACTACTGTCAACAGCATCTTCGTGTTCCTATGACGTTCGGCCAAGGGACCAAGG |
| | TGGAAATCAAACGG (SEQ ID NO: 486) |
| ABT1-141- | GACATCCAGATGACCCAGTCTCCATCCTCCCTGTCTGCATCTGTAGGAGACCGTGTCACCAT |
| 77 | CACTTGCCGGGCAAATCAGTGGATTCAGAAGCAGTTAGCGTGGTATCAGCAGAAACCGGGGA |
| | AAGCCCCTAAGCTCCTGATCTTCTCTTCGTCCCATTTGCAAAGTGGGGTCCCATCACGTTTC |
| | AGTGGCAGTGGATCTGGGACAGATTTCACTCTCACCATCAGCAGTCTGCAACCTCAAGATTT |
| | TGCTACGTACTACTGTCAACAGCATCTTCGTGTTCCTATGACGTTCGGCCAAGGGACCAAGG |
| | TGGAAATCAAACGG (SEQ ID NO: 487) |
| ABT1-141- | GACATCCAGATGACCCAGTCTCCATCCTCCCTGTCTGCATCTGTAGGAGACCGTGTCACCAT |
| 78 | CACTTGCCGGGCAAATCAGTGGATTCAGAAGCAGTTAGCGTGGTATCAGCAGAAACCGGGGA |
| | AAGCCCCTAAGCTCCTGATCTATTCTTCGTCCCATTTGCAAAGTGGGGTCCCATCACGTTTC |
| | AGTGGCAGTGGATACGGGACAGATTTCACTCTCACCATCAGCAGTCTGCAACCTCAAGATTT |
| | TGCTACGTACTACTGTCAACAGCATCTTCGTGTTCCTATGACGTTCGGCCAAGGGACCAAGG |
| | TGGAAATCAAACGG (SEQ ID NO: 488) |
| ABT1-141- | GACATCCAGATGACCCAGTCTCCATCCTCCCTGTCTGCATCTGTAGGAGACCGTGTCACCAT |
| 79 | CACTTGCCGGGCAAATCAGTGGATTCAGAAGCAGTTAGCGTGGTATCAGCAGAAACCGGGGA |
| | AAGCCCCTAAGCTCCTGATCTTCTCTTCGTCCCATTTGCAAAGTGGGGTCCCATCACGTTTC |
| | AGTGGCAGTGGATCTGGGACAGATTTCACTCTCACCATCAGCAGTCTGCAACCTGAAGATTT |
| | TGCTACGTACTACTGTCAACAGCATCTTCGTGTTCCTATGACGTTCGGCCAAGGGACCAAGG |
| | TGGAAATCAAACGG (SEQ ID NO: 489) |
| ABT1-141- | GACATCCAGATGACCCAGTCTCCATCCTCCCTGTCTGCATCTGTAGGAGACCGTGTCACCAT |
| 80 | CACTTGCCGGGCAAATCAGTGGATTCAGAAGCAGTTAGCGTGGTATCAGCAGAAACCGGGGA |
| | AAGCCCCTAAGCTCCTGATCTATTCTTCGTCCCATTTGCAAAGTGGGGTCCCATCACGTTTC |
| | AGTGGCAGTGGATACGGGACAGATTTCACTCTCACCATTAGCAGTCTGCAACCTGAAGATTT |
| | TGCTACGTACTACTGTCAACAGCATCTTCGTGTTCCTATGACGTTCGGCCAAGGGACCAAGG |
| | TGGAAATCAAACGG (SEQ ID NO: 490) |
| ABT1-141- | GACATCCAGATGACCCAGTATCCATCCTCCCTGTCTGCATCTGTAGGAGACCGTGTCACCAT |
| 500 | CACTTGCCGGGCAAGTCAGTGGATTCAGAAGCAGCTAGCGTGGTATCAGCAGAAACCAGGGA |
| | AAGCCCCTAAGCTCCTGATCTATTCTTCGTCCTATTTGCAAAGTGGGGTCCCATCACGTTTC |
| | AGTGGCAGTGGATCTGGGACAGATTTCACTCTCACCATCAGCAGTCTGCGGCCTGAAGATTT |
| | TGCTACGTACTACTGTCAACAGCATCTGAGGGTGCCTTTTACGTTCGGCCAAGGGACCAAGG |
| | TGGAAATCAAACGG (SEQ ID NO: 491) |
| ABT1-141- | GACATCTTGATGACCCAGTCTCCATCCTCCCTGTCTGCATCTGTAGGAGACCGTGTCACCAT |
| 501 | CACTTGCCGGGCAAGTCAGTGGATTCAGAAGCAGTTAGCGTGGTATCAGCAGAAACCAGGGA |
| | AAGCCCCTAAGCTCCTGATCTACTCCGCCTCCACGTTGCAAAGTGGGGTCCCATCACGTTTC |
| | AGTGGCAGTGGATCTGGGACAGATTTCACTCTCACCATCAGCAGTCTGCAACCTGAAGATTT |
| | TGCTACGTACTACTGTCAACAGTGGCTGTCTATTCCTCATACGTTCGGCCAAGGGACCAAGG |
| | TGGGAATCAAACGG (SEQ ID NO: 492) |
| ABT1-141- | GACATCCAGGTGACCCAGTCTCCATCCTCCCTGTCTGCATCTGTAGGAGACCGTGTCACCAT |
| 502 | CACTTGCCGGGCAAGTCAGTGGATTCAGAAGCAGTTAGCGTGGTACCAGCAGAAACCAGGGA |
| | AAGCCCCCAGGCTCCTGATCTATGCTGCGTCCGCTTTGCGAAGTGGGGTCCCATCACGTTTC |
| | AGTGGCAGTGGATCTGGGACAGATTTCACTCTCACCATCAGCAGTCTGCAACCTGAAGATTT |
| | TGCCACGTACTACTGTCAACAGACTTTGAGGAGCCCTTTTACGTTCGGCCAAGGGACCAAGG |
| | TGGAAATCAAACGG (SEQ ID NO: 493) |
| ABT1-141- | GACATCCAGATGACCCAGTCCCCATCCTCCCTGTCTGCATCTGTAGGAGGCCGTGTCACCAT |
| 503 | CACTTGCCGGGCAAGTCAGTGGATTCAGAAGCAGTTAGCGTGGTATCAGCAGAAACCAGGGA |
| | AAGCCCCCAAGCTCCTGGTCTATGCGGCTTCCTGGTTGCAAAGTGGGGTCCCATCACGTTTC |
| | AGTGGCAGTGGATCTGGGACAGATTTCACTCTCACCATCAGCAGTCTGCAACCTGAAGATTT |
| | TGCTACGTACTACTGTCAACAGAGTCTGAGGGCGCCTTTTACGTTCGGCCAAGGGACCAAGG |
| | TGGAAATCAAACGG (SEQ ID NO: 494) |
| ABT1-141- | GACATCCAGATGACCCAGTCTCCATCCTCCCTGTCTGCATCTGTAGGAGACCGTGTCACCAT |
| 504 | CACTTGCCGGGCAAGTCAGTGGATTCAGAAGCAGTTAGCGTGGTATGAGCAGAAACCAGGGG |
| | GAGCCCCTAAGCTCCTGATCTATTCTTCGTCCTATTTGCAAAGTGGGGTCCCATCACGTTTC |
| | AGTGGCAGTGGATCTGGGACAGATTTGACTCTCACCATCAGCAGTCTGCAACCTGAAGATTT |
| | TGCTACGTACTACTGTCAACAGAATCTGTCGGTTCCTTTTACGTTCGGCCAAGGGACCAAGG |
| | TGGAAATCAAACGG (SEQ ID NO: 495) |
| ABT1-141- | GACATCCAGATGACCCAGTCTCCATCCTCCCTGTCTGCATCTGTAGGAGACCGTGTCACCAT |
| 505 | CACTTGCCGGGCAAGTCAGTGGATTCAGAAGCAGTTAGCGTGGTATCAGCAGAAACCAGGGA |
| | AAGCCCCTAAGCTCCTGATCTATTCTTCGTCCTATTTGCAAAGTGGGGTCCCATCACGTTTC |
| | AGTGGCAGTGGATCTGGGACAGATTTCACTCTCACCATCAGCAGTCTGCAACCTGAAGATTT |
| | TGCTACGTACTACTGTCAACAGAATCTGTCGGTTCCTTTTACGTTCGGCCAAGGGACCAAGG |
| | TGGAAATCAAACGG (SEQ ID NO: 496) |
| ABT1-141- | GACATCCAGATGACCCAGTCCCCATCCTCCCTGTCTGCATCTGTAGGAGACCGTGTCACCAT |
| 506 | CACTTGCCGGGCAAGTCAGTGGATTCAGAAGCAGTTAGCGTGGTATCAGCAGAAGCCAGGGA |
| | GAGCCCCTAGGCTCCTGATCTATTCTTCGTCCTATTTGCAAAGCGGGGTCCCATCACGTTTC |
| | AGTGGCAGTGGATCTGGGACAGATTTCACTCTCACCATCAGCAGTCTGCAACCTGAAGATTT |
| | TGCTACGTACTACTGTCAACAGAATCTGTCGGTTCCTTTTACGTTCGGCCAAGGGACCAAGG |
| | TGGAAATCAAACGG (SEQ ID NO: 497) |
| ABT1-141- | GATATTCAGATGACCCAGAGCCCGAGCAGCCTGAGCACCAGCGTGGGCGATCGTGTGACCAT |
| 507 | TACCTGCCGTGCGAGCCTGTGGATTCAGAAACAGCTGGCGTGGTATCAGCAGAAACCGGGCA |
| | AAGCGCCGAAACTGCTGATTTATGCGGGCAGCTTTCTGCAGAGCGGCGTGCCGAGCCGTTTT |
| | AGCGGCAGCGGCAGCGGCACCGATTTTGCGCTGACCATTAGCAGCCTGCAGCCGGAAGATTT |
| | TGCGACCTATTATTGCCAGCAGACCCTGTTTTATCCGTTTACCTTTGGCCAGGGCACCAAAG |
| | TGGAAATTAAACGT (SEQ ID NO: 498) |
| ABT1-141- | GATATTCAGATGACCCAGAGCCCGAGCAGCCTGAGCGCGAGCGTGGGCGATCGTGTGACCAT |
| 508 | TACCTGCCGTGCGAGCCAGTGGATTCAGAAACAGCTGGCGTGGTATCAGCAGAAACCGGGCC |
| | GTGCGCCGAAACTGCTGATTTATAGCAGCAGCTATCTGCAGAGCGGCGTGCCGAGCCGTTTT |
| | AGCGGCAGCGGCAGCGGCACCGATTTTACCCTGACCATTAGCAGCCTGCAGCCGGAAGATTT |
| | TGCGGCGTATTATTGCCAGCAGCATCTGCGTGTGCCGAACACCTTTAGCCAGGGCACCAAAG |
| | TGGAAGTGAAACGT (SEQ ID NO: 499) |
| ABT1-141- | GATATTCAGATGACCCAGAGCCCGAGCAGCCTGAGCGCGAGCGTGGGCGATCGTGTGACCAT |
| 509 | TACCTGCCGTGCGAACCAGTGGATTCAGAAACAGCTGGCGTGGTATCAGCAGAAACCGGGCA |
| | AAGCGCTGAAACTGCTGGTGTATAGCGCGAGCTATCTGCAGAGCGGCGTGCCGAGCCGTTTT |
| | AGCGGCAGCGGCAGCGGCACCGATTTTACCCTGACCATTAGCAGCCTGCAGCCGGAAGATTT |
| | TGCGACCTATTATTGCCAGCAGCATCTGCGTGTGCCGTTTACCTTTGGCCAGGGCACCAAAG |
| | TGGAAATTAAACGT (SEQ ID NO: 500) |
| ABT1-141- | GATATTCAGATGACCCAGAGCCCGAGCAGCCTGAGCGCGAGCGTGGGCGATCGTGTGACCAT |
| 510 | TACCTGCCGTGCGAGCCAGTGGATTCAGAAACAGCTGGCGTGGTATCAGCAGAAACCGGGCA |
| | AAGCGCCGAAACTGCTGGTGTATGCGGCGAGCTGGCTGCAGAGCGGCGTGCCGAGCCGTTTT |
| | AGCGGCAGCGGCAGCGGCACCGATTTTACCCTGACCATTAGCAGCCTGCAGCCGGAAGATTT |
| | TGCGACCTATTATTGCCAGCAGAGCCTGCGTGCGCCGTTTACCTTTGGCCAGGGCACCAAAG |
| | TGGAAATTAAACGT (SEQ ID NO: 501) |
| ABT1-141- | GATATTCAGATGACCCAGAGCCCGAGCAGCCTGAGCGCGAGCGTGGGCGATCGTGTGACCAT |
| 511 | TACCTGCCGTGCGAGCCAGTGGATTCAGAAACAGCTGGCGTGGTATCAGCAGAAACCGGGCA |
| | AAACCCCGAAACTGCTGATTTATAGCAGCAGCTATCTGCAGAGCGGCATTCCGAGCCGTTTT |
| | AGCGGCAGCGGCAGCGGCACCGATTTTACCCTGACCATTAGCAGCCTGCAGCCGGAAGATTT |
| | TGCGACCTATTATTGCCAGCAGCATCTGCGTGTGCCGTTTACCTTTGGCCAGGGCACCAAAG |
| | TGGAAATTAAACGT (SEQ ID NO: 502) |
| ABT1-141- | GATATTCAGATGACCCAGAGCCCGAGCAGCCTGAGCGCGAGCGTGGGCGATCGTGTGACCAT |
| 512 | TACCTGCCGTGCGAGCCAGTGGATTCAGAAACAGCTGGCGTGGTATCAGCAGAAACCGGGCA |
| | AAGTGCCGAAACTGCTGATTTATAGCAGCAGCTATCTGCAGAGCGGCGTGCCGAGCCGTTTT |
| | AACGGCAGCGGCAGCGGCACCGATTTTACCCTGACCATTAGCAGCCTGCAGCCGGAAGATTT |
| | TGCGACCTATTATTGCCAGCAGACCCTGACCGTGCCGTTTACCTTTGGCCAGGGCACCAAAG |
| | TGGAAATTAAACGT (SEQ ID NO: 503) |
| ABT1-141- | GATATTCAGGTGACCCAGAGCCCGAGCAGCCTGAGCGCGAGCGTGGGCGATCGTGTGACCAT |
| 513 | TACCTGCCGTGCGAGCCAGTGGATTCAGAAACAGCTGGCGTGGTATCAGCAGAAACCGGGCA |
| | AAGCGCCGCGTCTGCTGATTTATGCGGCGAGCGCGCTGCAGAGCGGCGTGCCGAGCCGTTTT |
| | AGCGGCGGCGGCAGCGGCACCGATTTTACCCTGACCATTAGCGGCCTGCAGCCGGAAGATTT |
| | TGCGACCTATTATTGCCAGCAGACCCTGCGTAGCCCGTTTACCTTTGGCCAGGGCACCAAAG |
| | TGGAAATTAAACGT (SEQ ID NO: 504) |
| ABT1-141- | GATATTCAGATGACCCAGAGCCCGAGCAGCCTGAGCGCGAGCGTGGGCGATCGTGTGACCAT |
| 514 | TACCTGCCGTGCGAGCCAGTGGATTCAGAAACAGCTGGCGTGGTATCAGCAGAAACCGGGCA |
| | AAGCGCCGCGTCTGCTGATTTATAGCAGCAGCTATCTGCAGAGCGGCGTGCCGAGCCGTTTT |
| | AGCGGCAGCGGCAGCGGCACCGATTTTACCCTGACCATTAGCAGCCTGCAGCCGGAAGATTT |
| | TGCGACCTATTATTGCCAGCAGAACCTGAGCGTGCCGTTTACCTTTGGCCAGGGCACCAAAG |
| | TGGAAATTAAACGT (SEQ ID NO: 505) |
| ABT1-141- | GACATCCAGATGACCCAGTCTCCATCCTCCCTGTCTGCATCTGTAGGAGACCGTGTCACCAT |
| 516 | CAATTGCCGGGCAAATCAGTGGATTCAGAAGCAGTTAGCGTGGTACCAGCAGAAACCAGGGA |
| | AGGCCCTTAAGCTCCTGGTCTATAGTGCGTCCTATCTGCAAAGTGGGGTCCCATCACGTTTC |
| | AGTGGCAGTGGATCTGGGTCAGATTTCACTCTCACCATCAGCAGTCTGCAACCTGAAGATTT |
| | TGCTACGTACTACTGTCAACAGCATCTGAGGGTGCCTTTTACGTTCGGCCAAGGGACCAAGG |
| | TGGAAATCAAACGG (SEQ ID NO: 506) |
| ABT1-141- | GACATCCAGATGACCCAGTCTCCATCCTCCCTGTCTGCATCTGTAGGAGACCGTGTCACCTT |
| 519 | CACTTGCCGGGCAAGTCAGTGGATTCAGAAGCAGTTAGCGTGGTACCAGCAGAAACCAGGGA |
| | AAGTCCCTAAGCTCCTGATCTATTCTTCGTCCTATTTGCAAAGTGGGGTCCCATCACGTTTC |
| | AGTGGCAGTGGATCTGGGACAGATTTCACTCTCACCATCAGCAGTCTGCAACCTGAAGATTT |
| | TGCTACGTACTTCTGTCAACAGACTTTGACTGTGCCTTTTACGTTCGGCCAAGGGACCAAGG |
| | TGGAAATCAAACGG (SEQ ID NO: 507) |
| ABT1-141- | GACATCCAGATGACCCAGTCTCCATCCTCCCTGTCTGCATCTGTAGGAGACCGTGTCACCAT |
| 520 | CAATTGCCGGGCAAATCAGTGGATTCAGAAGCAGTTAGCGTGGTACCAGCAGAAACCAGGGA |
| | AGGCCCTTAAGCTCCTGGTCTATAGTGCGTCCTATCTGCAAAGTGGGGTCCCATCAAGGTTC |
| | AGTGGCAGTGGATCTGGGACAGATTTCACTCTCACCATCAGCAGTCTGCAACCTGAAGATTT |
| | TGCTACGTACTACTGTCAACAGCATCTTCGTGTTCCTATGACGTTCGGCCAAGGGACCAAGG |
| | TGGAAATCAAACGG (SEQ ID NO: 508) |
| ABT1-141- | GACATCCAGATGACCCAGTCTCCATCCTCCCTGTCTGCATCTGTAGGAGACCGTGTCACCAT |
| 521 | CACTTGCCGGGCAAGTCAGTGGATTCAGAAGCAGTTAGCGTGGTATCAGCAGAAACCAGGGA |
| | AAGCCCCTAAGCTCCTGATCTATTCGTCGTCCTGGTTGCAAAGTGGGGTCCCATCACGTTTC |
| | AGTGGCAGTGGATCTGGGACAGATTTCACTCTCACCATCAGCAGTCTGCAACCTGAAGATTT |
| | TGCTACGTACTACTGTCAACAGCATCTTCGTGTTCCTATGACGTTCGGCCAAGGGACCAAGG |
| | TGGAAATCAAACGG (SEQ ID NO: 509) |
| ABT1-141- | GACATCCAGATGACCCAGTCTCCATCCTCCCTGTCTGCATCTGTAGGAGACCGTGTCACCAT |
| 522 | CACTTGCCGGGCAAGTCAGTGGATTCAGAAGCAGTTAGCGTGGTATCAGCAGAAACCAGGGA |
| | AAGCCCCTAAGCTCCTGATCTATTCGTCGTCCTGGTGGCAAAGTGGGGTCCCATCACGTTTC |
| | AGTGGCAGTGGATCTGGGACAGATTTCACTCTCACCATCAGCAGTCTGCAACCTGAAGATTT |
| | TGCTACGTACTACTGTCAACAGCATCTTCGTGTTCCTATGACGTTCGGCCAAGGGACCAAGG |
| | TGGAAATCAAACGG (SEQ ID NO: 510) |
| ABT1-141- | GACATCCAGATGACCCAGTCTCCATCCTCCCTGTCTGCATCTGTAGGAGACCGTGTCACCAT |
| 523 | CACTTGCCGGGCAAGTCAGTGGATTCAGAAGCAGTTAGCGTGGTATCAGCAGAAACCAGGGA |
| | AAGCCCCTAAGCTCCTGATCTATTCGTCGTCCTGGTTGCAAAGTGGGGTCCCATCACGTTTC |
| | AGTGGCAGTGGATCTGGGACAGATTTCACTCTCACCATCAGCAGTCTGCAACCTGAAGATTT |
| | TGCTACGTACTACTGTCAACAGCATCTTCGTGTTCCTATGACGTTCGGCCAAGGGACCAAGG |
| | TGGAAATCAAACGG (SEQ ID NO: 511) |
| ABT1-141- | GACATCCAGATGACCCAGTCTCCATCCTCCCTGTCTGCATCTGTAGGAGACCGTGTCACCAT |
| 524 | CACTTGCCGGGCAAGTCAGTGGATTCAGAAGCAGTTAGCGTGGTATCAGCAGAAACCAGGGA |
| | AAGCCCCTAAGCTCCTGATCTATTCCTCGTCCTGGTTGCAAAGGGGGGTCCCATCACGTTTC |
| | AGTGGCAGTGGATCTGGGACAGATTTCACTCTCACCATCAGCAGTCTGCAACCTGAAGATTT |
| | TGCTACGTACTACTGTCAACAGCATCTTCGTGTTCCTATGACGTTCGGCCAAGGGACCAAGG |
| | TGGAAATCAAACGG (SEQ ID NO: 512) |
| ABT1-141- | GACATCCAGATGACCCAGTCTCCATCCTCCCTGTCTGCATCTGTAGGAGACCGTGTCACCAT |
| 525 | CACTTGCCGGGCAAGTCAGTGGATTCAGAAGCAGTTAGCGTGGTATCAGCAGAAACCAGGGA |
| | AAGCCCCTAAGCTCCTGATCTATTCCTCGTCCTGGTTGCAAAGTGGGGCCCCATCACGTTTC |
| | AGTGGCAGTGGATCTGGGACAGATTTCACTCTCACCATCAGCAGTCTGCAACCTGAAGATTT |
| | TGCTACGTACTACTGTCAACAGCATCTTCGTGTTCCTATGACGTTCGGCCAAGGGACCAAGG |
| | TGGAAATCAAACGG (SEQ ID NO: 513) |
| ABT1-141- | GACATCCAGATGACCCAGTCTCCATCCTCCCTGTCTGCATCTGTAGGAGACCGTGTCGCCAT |
| 526 | CACTTGCCGGGCAAGTCAGTGGATTCAGAAGCAGTTAGCGTGGTATCAGCAGAAACCAGGGA |
| | AAGCCCCTAAGCTCCTGATCTATTCTTCGTCCTATTTGCAAAGTGGGGTCCCATCACGTTTC |
| | AGTGGCAGTGGATCTGGGACAGATTTCACTCTCACCATCAGCAGTCTGCAACCTGAAGATTT |
| | TGCTACGTACTACTGTCAACAGCATCTTCGTGTTCCTATGACGTTCGGCCAAGGGACCAAGG |
| | TGGAAATCAAACGG (SEQ ID NO: 514) |
| ABT1-141- | GACATCCAGATGACCCAGTCTCCATCCTCCCTGTCTGCATCTGTAGGAGACCGTGTCACCAT |
| 527 | CACTTGCCGGGCAAGTCAGTGGATTCAGAAGCAGTTAGCGTGGTATCAGCAGAAACCAGGGA |
| | AAGCCCCTAAGCTCCTGATCTATTCTTCGTCCTATTTGCAAAGTGGGGTCCCATCACGTCTC |
| | AGTGGCAGTGGATCTGGGACAGATTTCACTCTCACCATCAGCAGTCTGCAACCTGAAGATTT |
| | TGCTACGTACTACTGTCAACAGCATCTTCGTGTTCCTATGACGTTCGGCCAAGGGACCAAGG |
| | TGGAAATCAAACGG (SEQ ID NO: 515) |
| ABT1-141- | GACATCCAGATGACCCAGTCTCCATCCTCCCTGTCTGCATCTGTAGGAGACCGTGTCACCAT |
| 528 | CACTTGCCGGGCAAGTCAGTGGATTCAGAAGCAGTTAGCGTGGTATCAGCAGAAACCAGGGA |
| | AAGCCCCTAAGCTCCTGATCTATTCTTCGATGCATAAGCAAAGTGGGGTCCCATCACGTTTC |
| | AGTGGCAGTGGATCTGGGACAGATTTCACTCTCACCATCAGCAGTCTGCAACCTGAAGATTT |
| | TGCTACGTACTACTGTCAACAGCATCTTCGTGTTCCTATGACGTTCGGCCAAGGGACCAAGG |
| | TGGAAATCAAACGG (SEQ ID NO: 516) |
| ABT1-141- | GACATCCAGATGACCCAGTCTCCATCCTCCCTGTCTGCATCTGTAGGAGACCGTGTCACCAT |
| 529 | CACTTGCCGGGCAAACCAGTGGATTCAGAAGCAGTTAGCGTGGTATCAGCAGAAACCAGGGA |
| | AAGCCCCTAAGCTCCTGATCTATAGCTCGTCCACGTTGCAAAGTGGGACCCCATCACGTTTC |
| | AGTGGCAGTGGATCTGGGACAGATTTCACTCTCACCATCAGCAGTCTGCAACCTGAAGATTT |
| | TGCTACGTACTACTGTCAACAGCATCTTCGTGTTCCTATGACGCTCGGCCAAGGGACCAAGG |
| | TGGAAATCAAACGG (SEQ ID NO: 517) |
| ABT1-141- | AACATCCAGATGACCCAGTCTCCATCCTCCCTGTCTGCATCTGTAGGAGACCGTGTCACCAT |
| 530 | CACTTGCCGGGCATCGGAGTGGATTCAGAAGCAGTTAGCGTGGTATCAGCAGAAACCAGGGA |
| | AAGCCCCTAAGCTCCTGATCTATAGCTCGTCCTGGTTGCAAAGTGGGGTCCCATCACGTTTC |
| | AGTGGCAGTGGATCTGGGACAGATTTCACTCTCACCATCAGCAGTCTGCAACCTGAAGATTT |
| | TGCTACGTACTACTGTCAACAGCATCTTCGTGTTCCTATGACGTTCGGCCAAGGGACCAAGG |
| | TGGAAATCAAACGG (SEQ ID NO: 518) |
| ABT1-141- | GACATCCAGATGACCCAGTCTCCATCCTCCCTGTCTGCATCTGTAGGAGACCGTGTCACCAT |
| 531 | CACTTGCCGGGCAGACCAGTGGATTCAGAAGCAGTTAGCGTGGTATCAGCAGAAACCAGGGA |
| | AAGCCCCTAAGCTCCTGATCTATAGCTCGTCCTGGTTGCAAAGTGGGGTCCCATCACGTTTC |
| | AGTGGCAGTGGATCTGGGACAGATTTCACTCTCACCATCAGCAGTCTGCAACCTGAAGATTT |
| | TGCTACGTACTACTGTCAACAGCATCTTCGTGTTCCTATGACGTTCGGCCAAGGGACCAAGG |
| | TGGAAATCAAACGG (SEQ ID NO: 519) |
| ABT1-141- | GACATCCAGGTGACCCAGTCTCCATCCTCCCTGTCTGCATCTGTAGGAGACCGTGTCACCAT |
| 532 | CACTTGCCGGGCAGACCAGTGGATTCAGAAGCAGTTAGCGTGGTATCAGCAGAAACCAGGGA |
| | AAGCCCCTAAGCTCCTGATCTATAGCTCGTCCTGGTTGCAAAGTGGGGTCCCATCACGTTTC |
| | AGTGGCAGTGGATCTGGGACAGATTTCACTCTCACCATCAGCAGTCTGCAACCTGAAGATTT |
| | TGCTACGTACTACTGTCAACAGCATCTTCGTGTTCCTATGACGTTCGGCCAAGGGACCAAGG |
| | TGGAAATCAAACGG (SEQ ID NO: 520) |
| ABT1-141- | GACATCCAGATGACCCAGTCTCCATCCTCCCTGTCTGCATCTGTAGGAGACCGTGTCACCAT |
| 533 | CACTTGCCGGACGAACCAGTGGATTCAGAAGCAGTTAGCGTGGTATCAGCAGAAACCAGGGA |
| | AAGCCCCTAAGCTCCTGATCTATTCTTCGTCCCATAACCAAAGTGGGGTCCCATCACGTTTC |
| | AGTGGCAGTGGATCTGGGACAGATTTCACTCTCACCATCAGCAGTCTGCAACCTGAAGATTT |
| | TGCTACGTACTACTGTCAACAGCATCTTCGTGTTCCTATGACGTTCGGCCAAGGGACCAAGG |
| | TGGAAATCAAACGG (SEQ ID NO: 521) |
| ABT1-141- | GACATCCAGATGACCCAGTCTCCATCCTCCCTGTCTGCATCTGTAGGAGACCGTGTCACCAT |
| 534 | CACTTGCCGGGCAAGTCAGTGGATTCAGAAGCAGTTAGCGTGGTATCAGCAGAAACCAGGGA |
| | AAGCCCCTAAGCTCCTGATCTATTCTTCGAACCATCCGCAAAGTGGGGTCCCATCACGTTTC |
| | AGTGGCAGTGGATCTGGGACAGATTTCACTCTCACCATCAGCAGTCTGCAACCTGAAGATTT |
| | TGCTACGTACTACTGTCAACAGCATCTTCGTGTTCCTATGACGTTCGGCCAAGGGACCAAGG |
| | TGGAAGTCAAACGG (SEQ ID NO: 522) |
| ABT1-141- | GACATCCAGATGACCCAGTCTCCATCCTCCCTGTCTGCATCTGTAGGAGACCGTGTCACCAT |
| 535 | CACTTGCCGGGCAAGTCAGTGGATTCAGAAGCAGTTAGCGTGGTATCAGCAGAAACCAGGGA |
| | AAGCCCCTAAGCTCCTGATCTATTCTTCGGCGCATGCGCAAAGTGGGGTCCCATCACGTTTC |
| | AGTGGCAGTGGATCTGGGACAGATTTCACTCTCACCATCAGCAGTCTGCAACCTGAAGATTT |
| | TGCTACGTACTACTGTCAACAGCATCTTCGTGTTCCTATGACGTTCGGCCAAGGGACCAAGG |
| | TGGAAATCAAACGG (SEQ ID NO: 523) |
| ABT1-141- | GACATCCAGATGACCCAGTCTCCATCCTCCCTGTCTGCATCTGTAGGAGACCGTGTCACCAT |
| 536 | CACTTGCCGGGCAAGTCAGTGGATTCAGAAGCAGTTAGCGTGGTATCAGCAGAAACCAGGGA |
| | AAGCCCCTAAGCTCCTGATCTATTCTTCGGCCCATTTGCAAAGTGGGGTCCCATCACGTTTC |
| | AGTGGCAGTGGATCTGGGACAGATTTCACTCTCACCATCAGCAGTCTGCAACCTGAAGATTT |
| | TGCTACGTACTACTGTCAACAGCATCTTCGTGTTCCTATGACGTTCGGCCAAGGGACCAAGG |
| | TGGAAATCAAACGG (SEQ ID NO: 524) |
| ABT1-141- | GACATCCAGATGACCCAGTCTCCATCCTCCCTGTCTGCATCTGTAGGAGACCGTGTCACCAT |
| 537 | CACTTGCCGGGCAAGTCAGTGGATTCAGAAGCAGTTAGCGTGGTATCAGCAGAAACCAGGGA |
| | AAGCCCCTAAGCTCCTGATCTATTCTTCGATGCATACCCAAAGTGGGGTCCCATCACGTTTC |
| | AGTGGCAGTGGATCTGGGACAGATTTCACTCTCACCATCAGCAGTCTGCAACCTGAAGATTT |
| | TGCTACGTACTACTGTCAACAGCATCTTCGTGTTCCTATGACGTTCGGCCAAGGGACCAAGG |
| | TGGAAATCAAACGG (SEQ ID NO: 525) |
| ABT1-141- | GACATCCAGATGACCCAGTCTCCATCCTCCCTGTCTGCATCTGTAGGAGACCGTGTCACCAT |
| 538 | CACTTGCCGGGCAAGTCAGTGGATTCAGAAGCAGTTAGCGTGGTATCAGCAGAAACCAGGGA |
| | AAGCCCCTAAGCTCCTGATCTATTCTTCGAACCATTCCCAAAGTGGGGTCCCATCACGTTTC |
| | AGTGGCAGTGGATCTGGGACAGATTTCACTCTCACCATCAGCAGTCTGCAACCTGAAGATTT |
| | TGCTACGTACTACTGTCAACAGCATCTTCGTGTTCCTATGACGTTCGGCCAAGGGACCAAGG |
| | TGGAAATCAAACGG (SEQ ID NO: 526) |
| ABT1-141- | GACATCCAGATGACCCAGTCTCCATCCTCCCTGTCTGCATCTGTAGGAGACCGTGTCACCAT |
| 539 | CACTTGCCGGGCGAACGAGTGGATTCAGAAGCAGTTAGCGTGGTATCAGCAGAAACCAGGGA |
| | AAGCCCCTAAGCTCCTGATCTATTCTTCGATGCATCCCCAAAGTGGGGTCCCATCACGTTTC |
| | AGTGGCAGTGGATCTGGGACAGATTTCACTCTCACCATCAGCAGTCTGCAACCTGAAGATTT |
| | TGCTACGTACTACTGTCAACAGCATCTTCGTGTTCCTATGACGTTCGGCCAAGGGACCAAGG |
| | TGGAAATCAAACGG (SEQ ID NO: 527) |
| ABT1-141- | GACATCCAGATGACCCAGTCTCCATCCTCCCTGTCTGCATCTGTAGGAGACCGTGTCACCAT |
| 541 | CACTTGCCGGGCAAGTCAGTGGATTCAGAAGCAGTTAGCGTGGTATCAGCAGAAACCAGGGA |
| | AAGCCCCTAAGCTCCTGATCTATTCTTCGATGCATCCGCAAAGTGGGGTCCCATCACGTTTC |
| | AGTGGCAGTGGATCTGGGACAGATTTCACTCTCACCATCAGCAGTCTGCAACCTGAAGATTT |
| | TGCTACGTACTACTGTCAACAGCATCTTCGTGTTCCTATGACGTTCGGCCAAGGGACCAAGG |
| | TGGAAATCAAACGG (SEQ ID NO: 528) |
| ABT1-141- | GACATCCAGATGACCCAGTCTCCATCCTCCCTGTCTGCATCTGTAGGAGACCGTGTCACCAT |
| 542 | CACTTGCCGGGCAAGTCAGTGGATTCAGAAGCAGTTAGCGTGGTATCAGCAGAAACCAGGGA |
| | AAGCCCCTAAGCTCCTGATCTATTCTTCGATGCATTCCCAAAGTGGGGTCCCATCACGTTTC |
| | AGTGGCAGTGGATCTGGGACAGATTTCACTCTCACCATCAGCAGTCTGCAACCTGAAGATTT |
| | TGCTACGTACTACTGTCAACAGCATCTTCGTGTTCCTATGACGTTCGGCCAAGGGACCAAGG |
| | TGGAAATCAAACGG (SEQ ID NO: 529) |
| ABT1-141- | GACATCCAGATGACCCAGTCTCCATCCTCCCTGTCTGCATCTGTAGGAGACCGTGTCACCAT |
| 543 | CACTTGCCGGTCGAACGAGTGGATTCAGAAGCAGTTAGCGTGGTATCAGCAGAAACCAGGGA |
| | AAGCCCCTAAGCTCCTGATCTATTCTTCGACCCATCGGCAAAGTGGGGTCCCATCACGTTTC |
| | AGTGGCAGTGGATCTGGGACAGATTTCACTCTCACCATCAGCAGTCTGCAACCTGAAGATTT |
| | TGCTACGTACTACTGTCAACAGCATCTTCGTGTTCCTATGACGTTCGGCCAAGGGACCAAGG |
| | TGGAAATCAAACGG (SEQ ID NO: 530) |
| ABT1-141- | GACATCCAGATGACCCAGTCTCCATCCTCCCTTTCTGCATCTGTAGGAGACCGTGTCACCAT |
| 544 | CACTTGCCGGGCAAGTCAGTGGATTCAGAAGCAGTTAGCGTGGTATCAGCTGAAACCAGGGA |
| | AAGCCCCTAAGCTCCTGATCTATTCTTCGTCATATTTGCAAAGTGGGGTCCCATCACGTTTC |
| | AGTGGCAGTGGATCTGGGACAGATTTCACTCTCACCATCAGCAGTCTGCAACCTGAAGATTT |
| | TGCTACGTACTACTGTCAACAGCATCTTCGTGTTCCTATGACGTTCGGCCAAGGGACCAAGG |
| | TGGAAATCAAACGG (SEQ ID NO: 531) |
| ABT1-141- | GACATCCAGATGACCCAGTCTCCATCCTCCCTGTCTGCATCTGTAGGAGACCGTGTCACCAT |
| 545 | CACTTGCCGGGCAAACCAGTGGATTCAGAAGCAGTTAGCGTGGTATCAGCAGAAACCAGGGA |
| | AAGCCCCTAAGCTCCTGATCTATTCTTCGTCCTATTTGCAAAGTGGGGTCCCATCACGTTTC |
| | AGTGGCAGTGGATCTGGGACAGATTTCACTCTCACCATCAGCAGTCTGCAACCTGAAGATTT |
| | TGCTACGTACTACTGTCAACAGCATCTTCGTGTTCCTATGACGTTCGGCCAAGGGACCAAGG |
| | TGGAAATCAAACGG (SEQ ID NO: 532) |
| ABT1-141- | GACATCCAGATGACCCAGTCTCCATCCTCCCTGTCTGCATCTGTAGGAGACCGTGTCACCAT |
| 546 | CACTTGCCGGGCATCGGAGTGGATTCAGAAGCAGTTAGCGTGGTATCAGCAGAAACCAGGGA |
| | AAGCCCCTAAGCTCCTGATCTATTCGTCGTCCTGGTTGCAAAGTGGGGTCCCATCACGTTTC |
| | AGTGGCAGTGGATCTGGGACAGATTTCACTCTCACCATCAGCAGTCTGCAACCTGAAGATTT |
| | TGCTACGTACTACTGTCAACAGCATCTTCGTGTTCCTATGACGTTCGGCCAAGGGACCAAGG |
| | TGGAAATCAAACGG (SEQ ID NO: 533) |
| ABT1-141- | GACATCCAGATGACCCAGTCTCCATCCTCCCTGTCTGCATCTGTAGGAGACCGTGTCACCAT |
| 547 | CACTTGCCGGGCAAACTCGTGGATTCAGAAGCAGTTAGCGTGGTATCAGCAGAAACCAGGGA |
| | AAGCCCCTAAGCTCCTGATCTATTCTTCGTCCTATTTGCAAAGTGGGGTCCCATCACGTCTC |
| | AGTGGCAGTGGATCTGGGACAGATTTCACTCTCACCATCAGCAGTCTGCAACCTGAAGATTT |
| | TGCTACGTACTACTGTCAACAGCATCTTCGTGTTCCTATGACGTTCGGCCAAGGGACCAAGG |
| | TGGAAATCAAACGG (SEQ ID NO: 534) |
| ABT1-141- | GACATCCAGATGACCCAGTCTCCATCCTCCCTGTCTGCATCTGTAGGAGACCGTGTCACCAT |
| 548 | CACTTGCCGGGCAGACCAGTGGATTCAGAAGCAGTTAGCGTGGTATCAGCAGAAACCAGGGA |
| | AAGCCCCTAAGCTCCTGATCTATTCTTCGTCCTATTTGCAAAGTGGGGTCCCATCACGTTTC |
| | AGTGGCAGTGGATCTGGGACAGATTTCACTCTCACCATCAGCAGTCTGCAACCTGAAGATTT |
| | TGCTACGTACTACTGTCAACAGCATCTTCGTGTTCCTATGACGTTCGGCCAAGGGACCAAGG |
| | TGGAAATCAAACGG (SEQ ID NO: 535) |
| ABT1-141- | GACATCCAGATGACCCAGTCTCCATCCTCCCTGTCTGCATCTGTAGGAGACCGTGTCACCAT |
| 549 | CACTTGCCGGGCAAACCAGTGGATTCAGAAGCAGTTAGCGTGGTATCAGCAGAAACCAGGGA |
| | AAGCCCCTAAGCTCCTGATCTATTCTTCGTCCTATTTGCAAAGTGGGGTCCCATCACGTTTC |
| | AGTGGCAGTGGATCTGGGACAGATTTCACTCTCACCATCAGCAGTCTGCAACCTGAAGATTT |
| | TGCTACGTACTACTGTCAACAGCATCTTCGTGTTCCTATGACGTTCGGCCAAGGGACCAAGG |
| | TGGAAATCAAACGG (SEQ ID NO: 536) |
| ABT1-141- | GACATCCAGATGACCCAGTCTCCATCCTCCCTGTCTGCATCTGTAGGAGACCGTGTCACCAT |
| 550 | CACTTGCCGGGCAAGTCAGTGGATTCAGAAGCAGTTAGCGTGGTATGAGCAGAAACCAGGGA |
| | AAGCCCCTAAGCTCCTGATCTATTCCTCGTCCTGGTTGCAAAGTGGGATCCCATCACGTTTC |
| | AGTGGCAGTGGATCTGGGACAGATTTCACTCTGACCATCAGCAGTCTGCAACCTGAAGATTT |
| | TGCTACGTACTACTGTCAACAGCATCTTCGTGTTCCTATGACGTTCGGCCAAGGGACCAAGG |
| | TGGAAATCAAACGG (SEQ ID NO: 537) |
| ABT1-141- | GACATCCAGATGACCCAGTCTCCATCCTCCCTGTCTGCATCTGTAGGAGACCGTGTCACCAT |
| 551 | CACTTGCCGGGCAAGTCAGTGGATTCAGAAGCAGTTAGCGTGGTATCAGCAGAAACCAGGGA |
| | AAGCCCCTAAGCTCCTGATCTATTCTTCGTCCTGGTTGCAAAGTGGGGTCCCATCACGTTTC |
| | AGTGGCAGTGGATCTGGGACAGATTTCACTCTCACCATCAGCAGTCTGCAACCTGAAGATTT |
| | TGCTACGTACTACTGTCAACAGCATCTTCGTGTTCCTATGACGTTCGGCCAAGGGACCAAGG |
| | TGGAAATCAAACGG (SEQ ID NO: 538) |
| ABT1-141- | GACATCCAGATGACCCAGTCTCCATCCTCCCTGTCTGCATCTGTAGGAGACCGTGTCACCAT |
| 552 | CACTTGCCGGGCAAGTCAGTGGATTCAGAAGCAGTTAGCGTGGTATCAGCAGAAACCAGGGA |
| | AAGCCCCTAAGCTCCTGATCTATAGCTCGTCCTGGTTGCAAAGTGGGGTCCCATCACGTTTC |
| | AGTGGCAGTGGATCTGGGACAGATTTCACTCTCACCATCAGCAGTCTGCAACCTGAAGATTT |
| | TGCTACGTACTACTGTCAACAGCATCTTCGTGTTCCTATGACGTTCGGCCAAGGGACCAAGG |
| | TGGAAATCAAACGG (SEQ ID NO: 539) |
| ABT1-141- | GACATCCAGATGACCCAGTCTCCATCCTCCCTGTCTGCATCTGTAGGAGACCGTGTCACCAT |
| 553 | CACTTGCCGGGCAAGTCAGTGGATTCAGAAGCAGTTAGCGTGGTATCAGCAGAAACCAGGGA |
| | AAGCCCCTAAGCTCCTGATCTATTCGTCGTCCTGGTTGCAAAGTGGGGCCCCATCACGTTTC |
| | AGTGGCAGTGGATCTGGGACAGATTTCACTCTCACCATCAGCAGTCTGCAACCTGAAGATTT |
| | TGCTACGTACTACTGTCAACAGCATCTTCGTGTTCCTATGACGTTCGGCCAAGGGACCAAGG |
| | TGGAAATCAAACGG (SEQ ID NO: 540) |
| ABT1-141- | GACATCCAGATGACCCAGTCTCCATCCTCCCTGTCTGCATCTGTAGGAGACCGTGTCACCAT |
| 554 | CACTTGCCGGGCAAGTCAGTGGATTCAGAAGCAGTTAGCGTGGTATCAGCAGAAACCAGGGA |
| | AAGCCCCTAAGCTCCTGATCTATAGCTCGTCCTGGTTGCAAAGTGGGGTCCCATCACGTTTC |
| | AGTGGCAGTGGATCTGGGACAGATTTCACTCTCACCATCAGCAGTCTGCAACCTGAAGATTT |
| | TGCTACGTACTACTGTCAACAGCATCTTCGTGTTCCTATGACGTTCGGCCAAGGGACCAAGG |
| | TGGAAATCAAACGG (SEQ ID NO: 541) |
| ABT1-141- | GACATCCAGATGACCCAGTCTCCATCCTCCCTGTCTGCATCTGTAGGAGACCGTGTCACCAT |
| 555 | CACTTGCCGGGCAAGTCAGTGGATTCAGAAGCAGTTAGCGTGGTATCAGCAGAAACCAGGGA |
| | AAGCCCCTAAGCTCCTGATCTATTCCTCGTCCCACTCGCAAAGTGGGGTCCCATCACGTTTC |
| | AGTGGCAGTGGATCTGGGACAGATTTCACTCTCACCATCAGCAGTCTGCAACCTGAAGATTT |
| | TGCTACGTACTACTGTCAACAGCATCTTCGTGTTCCTATGACGTTCGGCCAAGGGACCAAGG |
| | TGGAAATCAAACGG (SEQ ID NO: 542) |
| ABT1-141- | GACATCCAGATGACCCAGTCTCCATCCTCCCTGTCTGCATCTGTAGGAGACCGTGTCACCAT |
| 556 | CACTTGCCGGGCAAGTCAGTGGATTCAGAAGCAGTTAGCGTGGTATCAGCAGAAACCAGGGA |
| | AAGCCCCTAAGCTCCTGATCTATTCCTCGTCCTGGTTGCAAAGTGGGGTCCCATCACGTTTC |
| | AGTGGCAGTGGATCTGGGACAGATTTCACTCTCACCATCAGCAGTCTGCAACCTGAAGATTT |
| | TGCTACGTACTACTGTCAACAGCATCTTCGTGTTCCTATGACGTTCGGCCAAGGGACCAAGG |
| | TGGAAATCAAACGG (SEQ ID NO: 543) |
| ABT1-141- | GACATCCAGATGACCCAGTCTCCATCCTCCCTGTCTGCATCTGTAGGAGACCGTGTCACCAT |
| 557 | CACTTGCCGGGCAAGTCAGTGGATTCAGAAGCAGTTAGCGTGGTATCAGCAGAAACCAGGGA |
| | AAGCCCCTAAGCTCCTGATCTATAGCTCGTCCTGGATGCAAAGTGGGGTCCCATCACGTTTC |
| | AGTGGCAGTGGATCTGGGACAGATTTCACTCTCACCATCAGCAGTCTGCAACCTGAAGATTT |
| | TGCTACGTACTACTGTCAACAGCATCTTCGTGTTCCTATGACGTTCGGCCAAGGGACCAAGG |
| | TGGAAATCAAACGG (SEQ ID NO: 544) |
| ABT1-141- | GACATCCAGATGACCCAGTCTCCATCCTCCCTGTCTGCATCTGTAGGAGACCGTGTCACCAT |
| 558 | CACTTGCCGGGCAAGTCAGTGGATTCAGAAGCAGTTAGCGTGGTATCAGCAGAAACCAGGGA |
| | AAGCCCCTAAGCTCCTGATCTATATGTCGTCCGAGTTGCAAAGTGGGGTCCCATCACGTTTC |
| | AGTGGCAGTGGATCTGGGACAGATTTCACTCTCACCATCAGCAGTCTGCAACCTGAAGATTT |
| | TGCTACGTACTACTGTCAACAGCATCTTCGTGTTCCTATGACGTTCGGCCAAGGGACCAAGG |
| | TGGAAATCAAACGG (SEQ ID NO: 545) |
| ABT1-141- | GACATCCAGATGACCCAGTCTCCATCCTCCCTGTCTGCATCTGTAGGAGACCGTGTCACCAT |
| 559 | CACTTGCCGGGCAAGTCAGTGGATTCAGAAGCAGTTAGCGTGGTATCAGCAGAAACCAGGGA |
| | AAGCCCCTAAGCTCCTGATCTATTCCTCGTCCTGGTCGCAAAGTGGGGTCCCATCACGTTTC |
| | AGTGGCAGTGGATCTGGGACAGATTTCACTCTCACCATCAGCAGTCTGCAACCTGAAGATTT |
| | TGCTACGTACTACTGTCAACAGCATCTTCGTGTTCCTATGACGTTCGGCCAAGGGACCAAGG |
| | TGGAAATCAAACGG (SEQ ID NO: 546) |
| ABT1-141- | GACATCCAGATGACCCAGTCTCCATCCTCCCTGTCTGCATCTGTAGGAGACCGTGTCACCAT |
| 561 | CACTTGCCAGGCACACCAGTGGATTCAGAAGCAGTTAGCGTGGTATCAGCAGAAACCAGGGA |
| | AAGCCCCTAAGCTCCTGATCTATTCCTCGTCCTGGTTGCAAAGTGGGGTCCCATCACGTTTC |
| | AGTGGCAGTGGATCTGGGACAGATTTCACTCTCACCATCAGCAGTCTGCAACCTGAAGATTT |
| | TGCTACGTACTACTGTCAACAGCATCTTCGTGTTCCTATGACGTTCGGCCAAGGGACCAAGG |
| | TGGAAATCAAACGG (SEQ ID NO: 547) |
| ABT1-141- | GACATCCAGATGACCCAGTCTCCATCCTCCCTGTCTGCATCTGTAGGAGACCGTGTCACCAT |
| 562 | CACTTGCCGGGCAAACCAGTGGATTCAGAAGCAGTTAGCGTGGTATCAGCAGAAACCAGGGA |
| | AAGCCCCTAAGCTCCTGATCTATAGCTCGTCCTGGTTGCAAAGTGGGGTCCCATCACGTTTC |
| | AGTGGCAGTGGATCTGGGACAGATTTCACTCTCACCATCAGCAGTCTGCAACCTGAAGATTT |
| | TGCTACGTACTACTGTCAACAGCATCTTCGTGTTCCTATGACGTTCGGCCAAGGGACCAAGG |
| | TGGAAATCAAACGG (SEQ ID NO: 548) |
| ABT1-141- | GACATCCAGATGACCCAGTCTCCATCCTCCCTGTCTGCATCTGTAGGAGACCGTGTCACCAT |
| 563 | CACTTGCCGGGCAGACAGCTGGATTCAGAAGCAGTTAGCGTGGTATCAGCAGAAACCAGGGA |
| | AAGCCCCTAAGCTCCTGATCTATTCTTCGTCCTATTTGCAAAGTGGGGTCCCATCACGTTTC |
| | AGTGGCAGAGGATCTGGGACAGATTTCACTCTCACCATCAGCAGTCTGCAACCTGAAGATTT |
| | TGCTTCGTACTACTGTCAACAGCATCTTCGTGTTCCTATGACGTTCGGCCAAGGGACCAAGG |
| | TGGAAATCAAACGG (SEQ ID NO: 549) |
| ABT1-141- | GACATCCAGATGACCCAGTCTCCATCCTCCCTGTCTGCATCTGTAGGAGACCGTGTCACCAT |
| 564 | CACTTGCCGGAGCAACGAGTGGATTCAGAAGCAGTTAGCGTGGTATCAGCAGAAACCAGGGA |
| | AAGCCCCTAAGCTCCTGATCTATTCTTCGTCCTATTTGCAAAGTGGGGTCCCATCACGTTTC |
| | AGTGGCAGTGGATCTGGGACAGATTTCACTCTCACCATCAGCAGTCTGCAACCTGAAGATTT |
| | TGCTACGTACTACTGTCAACAGCATCTTCGTGTTCCTATGACGTTCGGCCAAGGGACCAAGG |
| | TGGAAATCAAACGG (SEQ ID NO: 550) |
| ABT1-141- | GACATCCAGATGACCCAGTCTCCATCCTCCCTGTCTGCATCTGTAGGAGACCGTGTCACCAT |
| 565 | CACTTGCCGGGCAAGTCAGTGGATTCAGAAGCAGTTAGCGTGGTATCAGCAGAAACCAGGGA |
| | AAGCCCCTAAGCTCCTGATCTATTCTTCGATGCATCTCCAAAGTGGGGTCCCATCACGTTTC |
| | AGTGGCAGTGGATCTGGGACAGATTTCACTCTCACCATCAGCAGTCTGCAACCTGAAGATTT |
| | TGCTACGTACTACTGTCAACAGCATCTTCGTGTTCCTATGACGTTCGGCCAAGGGACCAAGG |
| | TGGAAATCAAACGG (SEQ ID NO: 551) |
| ABT1-141- | GACATCCAGATGACCCAGTCTCCATCCTCCCTGTCTGCATCTGTAGGAGACCGTGTCACCAT |
| 567 | CACTTGCCGGGCAAGTCAGTGGATTCAGAAGCAGTTAGCGTGGTATCAGCAGAAACCAGGGA |
| | AAGCCCCTAAGCTCCTGATCTACTCTTCGAACCATCCCCAAAGTGGGGTCCCATCACGTTTC |
| | AGTGGCAGTGGATCTGGGACAGATTTCACTCTCACCATCAGCAGTCTGCAACCTGAAGATTT |
| | TGCTACGTACTACTGTCAACAGCATCTTCGTGTTCCTATGACGTTCGGCCAAGGGACCAAGG |
| | TGGAAATCAAACGG (SEQ ID NO: 552) |
| ABT1-141- | GACATCCAGATGACCCAGTCTCCATCCTCCCTGTCTGCATCTGTAGGAGACCGTGTCACCAT |
| 568 | CACTTGCCGGGCAAGTCAGTGGATTCAGAAGCAGTTAGCGTGGTATCAGCAGAAACCAGGGA |
| | AAGCCCCTAAGCTCCTGATCTATTCTTCGGGCCATCCCCAAAGTGGGGTCCCATCACGTTTC |
| | AGTGGCAGTGGATCTGGGACAGATTTCACTCTCACCATCAGCAGTCTGCAACCTGAAGATTT |
| | TGCTACGTACTACTGTCAACAGCATCTTCGTGTTCCTATGACGTTCGGCCAAGGGACCAAGG |
| | TGGAAATCAAACGG (SEQ ID NO: 553) |
| ABT1-141- | GACATCCAGATGACCCAGTCTCCATCCTCCCTGTCTGCATCTGTAGGAGACCGTGTCACCAT |
| 569 | CACTTGCCGGGCCAACCAGTGGATTCAGAAGCAGTTAGCGTGGTATCAGCAGAAACCAGGGA |
| | AAGCCCCTAAGCTCCTGATCTATTCTTCGTCCCATCCCCAAAGTGGGGTCCCATCACGTTTC |
| | AGTGGCAGTGGATCTGGGACAGATTTCACTCTCACCATCAGCAGTCTGCAACCTGAAGATTT |
| | TGCTACGTACTACTGTCAACAGCATCTTCGTGTTCCTATGACGTTCGGCCAAGGGACCAAGG |
| | TGGAAATCAAACGG (SEQ ID NO: 554) |
| ABT1-141- | GACATCCAGATGACCCAGTCTCCATCCTCCCTGTCTGCATCTGTAGGAGACCGTGTCACCAT |
| 572 | CACTTGCCGGAGCAACGAGTGGATTCAGAAGCAGTTAGCGTGGTATCAGCAGAAACCAGGGA |
| | AAGCCCCTAAGCTCCTGATCTATTCTTCGTCCCATTTGCAAAGTGGGGTCCCATCACGTTTC |
| | AGTGGCAGTGGATCTGGGACAGATTTCACTCTCACCATCAGCAGTCTGCAACCTGAAGATTT |
| | TGCTACGTACTACTGTCAACAGCATCTTCGTGTTCCTATGACGTTCGGCCAAGGGACCAAGG |
| | TGGAAATCAAACGG (SEQ ID NO: 555) |
| ABT1-141- | GACATCCAGATGACCCAGTCTCCATCCTCCCTGTCTGCATCTGTAGGAGACCGTGTCACCAT |
| 573 | CACTTGCCGGACCAACGAGTGGATTCAGAAGCAGTTAGCGTGGTATCAGCAGAAACCAGGGA |
| | AAGCCCCTAAGCTCCTGATCTATTCTTCGGCCCATAGGCAAAGTGGGGTCCCATCACGTTTC |
| | AGTGGCAGTGGATCTGGGACAGGTTTCACTCTCACCATCAGCAGTCTGCAACCTGAAGATTT |
| | TGCTACGTACTACTGTCAACAGCATCTTCGTGTTCCTATGACGTTCGGCCAAGGGACCAAGG |
| | TGGAAATCAAACGG (SEQ ID NO: 556) |
| ABT1-141- | GACATCCAGATGACCCAGTCTCCATCCTCCCTGTCTGCATCTGTAGGAGACCGTGTCACCAT |
| 574 | CACTTGCCGGATCAACGAGTGGATTCAGAAGCAGTTAGCGTGGTATCAGCAGAAACCAGGGA |
| | AAGCCCCTAAGCTCCTGATCTATTCTTCGACACATCCGCAAAGTGGGGTCCCATCACGTTTC |
| | AGTGGCAGTGGATCTGGGACAGATTTCACTCTCACCATCAGCAGTCTGCAACCTGAAGATTT |
| | TGCTACGTACTACTGTCAACAGCATCTTCGTGTTCCTATGACGTTCGGCCAAGGGACCAAGG |
| | TGGAAATCAAACGG (SEQ ID NO: 557) |
| ABT1-142 | GACATCCAGATGACCCAGTCTCCATCCTCCCTGTCTGCATCTGTAGGAGACCGTGTCACCAT |
| | CACTTGCCGGGCAAGTCAGTCGATTAATGATGTGTTAGCTTGGTACCAGCAGAAACCAGGGA |
| | AAGCCCCTAGGCTCCTGATCTATTCGGCTTCCTATTTGCAAAGTGGGGTCCCATCACGTTTC |
| | AGTGGCAGTGGATCTGGGACAGATTTCACTCTCACCATCAGCAGTCTGCAACCTGAAGATTT |
| | TGCTACGTACTACTGTCAACAGTATATTAGTCTTCCTTTTACGTTCGGCCAAGGGACCAAGG |
| | TGGAAATCAAACGG (SEQ ID NO: 558) |
| ABT1-143 | GACATCCAGATGACCCAGTCTCCATCCTCCCTGTCTGCATCTGTAGGAGACCGTGTCACCAT |
| | CACTTGCCGGGCAAGTCAGAGGATTGATCGTCATTTATCTTGGTATCAGCAGAAACCAGGGA |
| | AAGCCCCTAAGCTCCTGATCTATAAGACTTCCAAGTTGCAAAGTGGGGTCCCATCACGTTTC |
| | AGTGGCAGTGGATCTGGGACAGATTTCACACTCACCATCAGCAGTCTGCAACCTGAAGATTT |
| | TGCTACGTACTACTGTCAGCAGCTTCATGCTAAGCCTTTTACGTTCGGTCAAGGGACCAAGG |
| | TGGAAATCAAACGG (SEQ ID NO: 559) |
| ABT1-144 | GACATCCAGATGACCCAGTCTCCATCCTCCCTGTCTGCATCTGTAGGAGACCGTGTCACTAT |
| | CACTTGCCGGGCAAGTCAGCGGATTAAGAAGTATTTAGCTTGGTACCAGCAGAAACCAGGGA |
| | AAGCCCCTAGGCTCCTGATCTATCGTTCTTCCCAGTTGCAAAGTGGGGTCCCATCACGTTTC |
| | AGTGGCAGTGGATCTGGGACAGATTTCACTCTCACCATCAGCAGTCTGCAACCTGAAGATTT |
| | TGCTACGTACTACTGTCAACAGTCGTTTAAGAGGCCTGTTACGTTCGGCCAAGGGACCAAGG |
| | TGGAAATCAAACGG (SEQ ID NO: 560) |
| ABT1-145 | GACATCCAGATGACCCAGTCTCCATCCTCCCTGTCTGCATCTGTAGGAGACCGTGTCACCAT |
| | CACTTGCCGGGCAAGTCAGGATATTGATGATGGTTTAGCGTGGTATCAGCAGAAACCCGGGA |
| | AAGCCCCTAAGCTCCTGATCTATCGTACGTCCCGGTTGCAAAGTGGGGTCCCATCACGTTTC |
| | AGTGGCAGTGGATCTGGGACAGATTTCACTCTCACCATCAGCAGTCTGCAACCTGAAGATTT |
| | TGCTACGTACTACTGTCAACCGACTTGGCTGCCTCCTTGTACGTTCGGCCAAGGGACCAAGG |
| | TGGAAATCAAACGG (SEQ ID NO: 561) |
| ABT1-146 | GACATCCAGATGACCCAGTCTCCATCCTCCCTGTCTGCATCTGTAGGAGACCGTGTCACCAT |
| | CACTTGCCGGGCAAGTCAGAATATTAAGACGTTTTTACATTGGTATCAGCAGAAACCAGGGA |
| | AAGCCCCTAAGCTCCTGATCTATCGTGTTTCCCATTTGCAAAGTGGGGTTCCATCACGTTTC |
| | AGTGGCAGTGGATCTGGGACAGATTTCACTCTCACCATCAGCAGTCTGCAACCTGAAGATTT |
| | TGCTACGTACTACTGTCAACAGGAGTATCGTATTCCTCTTACGTTCGGCCAAGGGACCAAGG |
| | TGGAAATCAAACGG (SEQ ID NO: 562) |
| ABT1-148 | GACATCCAGATGACCCAGTCTCCATCCTCCCTGTCTGCATCTGTAGGAGACCGTGTCACCAT |
| | CACTTGCCGGGCAAGTCAGAGCATTAGCAGCTATTTAAATTGGTACCAGCAGAAACCAGGGA |
| | AAGCCCCTAAGCTCCTGATCGGGGCTCTGTCCGGTTTGCAAAGTGGGGTCCCATCACGTTTC |
| | AGTGGCAGTGGATCTGGGACAGATTTCACTCTCACCATCAGCAGTCTGCAACCTGAAGATTT |
| | TGCTACGTACTACTGTATGCAGTGGTATCGTCATCCTTCTACGTTCGGCCAAGGGACCAAGG |
| | TGGAAATCAAACGG (SEQ ID NO: 563) |
| ABT1-149 | GACATCCAGATGACCCAGTCTCCATCCTCTCTGTCTGCATCTGTAGGAGACCGTGTCACCAT |
| | CACTTGCCGGGCAAGTCAGAGCATTAGCAGCTATTTAAATTGGTACCAGCAGAAACCAGGGA |
| | AAGCCCCTAAGCTCCTGATCGGTGGGCTGTCCGGTTTGCAAAGTGGGGTCCCATCACGTTTC |
| | AGTGGCAGTGGATCTGGGACAGATTTCACTCTCACCATCAGCAGTCTGCAACCTGAAGATTT |
| | TGCTACGTACTACTGTATGCAGTGGTGGCGGTGGCCTTCGACGTTCGGCCAAGGGACCAAGG |
| | TGGAAATCAAGCGGGCGGCCGCAGAACAAAAACTCATCTCAGAAGAGGAT (SEQ ID NO: |
| | 564) |
| ABT1-150 | GACATCCAGATGACCCAGTCTCCATCCTCCCTGTCTGCATCTGTAGGAGACCGTGTCACCAT |
| | CACTTGCCGGGCAAGTCAGAGCATTAGCAGCTATTTAAATTGGTACCAGCAGAAACCAGGGA |
| | AAGCCCCTAAGCTCCTGATCGGGGGTGTTTCCGGTTTGCAAAGTGGGGTCCCATCACGTTTC |
| | AGTGGCAGTGGATCTGGGACAGATTTCACTCTCACCATCAGCAGTCTGCAACCTGAAGATTT |
| | TGCTACGTACTACTGTATGCAGTGGTGGCGGTGGCCTTCGACGTTCGGCCAAGGGACCAAGG |
| | TGGAAATCAAACGGGCGGCCGCAGAACAAAAACTCATCTCAGAAGAGGAT (SEQ ID NO: |
| | 565) |
| ABT1-151 | GACATCCAGATGACCCAGTCTCCATCCTCCCTGTCTGCATCTGTAGGAGACCGTGTCACCAT |
| | CACTTGCCGGGCAAGTCAGAGCATTAGCAGCTATTTAAATTGGTACCAGCAGAAACCAGGGA |
| | AAGCCCCTAAGCTCCTGATCGGGGGTCGTTCCGGGTTGCAAAGTGGGGTCCCATCACGTTTC |
| | AGTGGCAGTGGATCTGGGACAGATTTCACTCTCACCATCAGCAGTCTGCAACCTGAAGATTT |
| | TGCTACGTACTACTGTGGGCAGTGGTATCGGCATCCTGCGACGTTCGGCCAAGGGACCAAGG |
| | TGGAAATCAAACGGGCGGCCGCAGAACAAAAACTCATCTCAGAAGAGGAT (SEQ ID |
| | NO: 566) |
| ABT1-152 | GACATCCAGATGACCCAGTCTCCATCCTCCCTGTCTGCATCTGTAGGAGACCGTGTCACCAT |
| | CACTTGCCGGGCAAGTCAGAGCATTAGCAGCTATTTAAATTGGTACCAGCAGAAACCAGGGA |
| | AAGCCCCTAAGCTCCTGATCGGGGGGAGGTCCGGTTTGCAAAGTGGGGTCCCATCACGTTTC |
| | AGTGGCAGTGGATCTGGGACAGATTTCACTCTCACCATCGGCAGTCTGCAACCTGAAGATTT |
| | TGCTACGTACTACTGCATGCAGTGGTATAGGGCGCCTAGTACGTTCGGCCAAGGGACCAAGG |
| | TGGAAATCAAACGGGCGGCCGCAGAACAAAAACTCATCTCAGAAGAGGAT (SEQ ID NO: |
| | 567) |
| ABT1-153 | GACATCCAGATGACCCAGTCTCCATCCTCCCTGTCTGCATCTGTAGGAGACCGTGTCACCAT |
| | CACTTGCCGGGCAAGTAGTCCTATTGTGGCTAATTTACGTTGGTACCAGCAGAAACCAGGGA |
| | AAGCCCCTAAGCTCCTGATCTATGCTGCATCCAGTTTGCAAAGTGGGGTCCCATCACGTTTC |
| | AGTGGCAGTGGATCTGGGACAGATTTCACTCTCACCATCAGCAGTCTGCAACCTGAAGATTT |
| | TGCTACGTACTACTGTACTCAGGGGTATGTGTGGCCTCCGACGTTCGGCCAAGGGACCAAGG |
| | TGGAAATCAAACGGGCGGCCGCAGAACAAAAACTCATCTCAGAAGAGGAT (SEQ ID NO: |
| | 568) |
| ABT1-154 | GACATCCAGATGACCCAGTCTCCATCCTCCCTGTCTGCATCTGTAGGAGACCGTGTCACCAT |
| | CACTTGCCGGGCAAGTACTGAGATTGTGCGTAATTTACGGTGGTACCAGCAGAAACCAGGGA |
| | AAGCCCCTAAGCTCCTGATCTCGGGTGTTTCCGGGTTGCAAAGTGGGGTCCCATCACGTTTC |
| | AGTGGCAGTGGATCTGGGACAGATTTCACTCTCACCATCAGCAGTCTGCAACCTGAAGATTT |
| | TGCTACGTACTACTGTGTTCAGGGTTATTCTTGGCCTGTTACGTTCGGCCAAGGGACCAAGG |
| | TGGAAATCAAACGG (SEQ ID NO: 569) |
| ABT1-155 | GACATCCAGATGACCCAGTCTCCATCCTCCCTGTCTGCATCTGTAGGAGACCGTGTCACCAT |
| | CACTTGCCGGGCAAGTAGTCCTATTGTGGCTAATTTACGTTGGTACCAGCAGAAACCAGGGA |
| | AAGCCCCTAAGCTCCTGATCTATGCTGCATCCAGTTTGCAAAGTGGGGTCCCATCACGTTTC |
| | AGTGGCAGTGGATCTGGGACAGATTTCACTCTCACCATCAGCAGTCTGCAACCTGAAGATTT |
| | TGCTACGTACTACTGTACTCAGGGGTATGTGTGGCCTCCGACGTTCGGCCAAGGGACCAAGG |
| | TGGAAATCAAACGG (SEQ ID NO: 570) |
| ABT1-156 | GACATCCAGATGACCCAGTCTCCATCCTCCCTGTCTGCATCTGTAGGAGACCGTGTCACCAT |
| | CACTTGCCGGGCAAGTTCGACTATTTTGGATAAGTTAGAGTGGTACCAGCAGAAACCAGGGA |
| | AAGCCCCTAAGCTCCTGATCTCTGGTGCGTCCTGGTTGCAAAGTGGGGTCCCATCACGTTTC |
| | AGTGGCAGTGGATCTGGGACAGATTTCACTCTCACCATCAGCAGTCTGCAACCTGAAGATTT |
| | TGCTACGTACTACTGTCGGCAGGCGTTGTGGGATCCTCCGACGTTCGGCCAAGGGACCAAGG |
| | TGGAAATCAAACGG (SEQ ID NO: 571) |
| ABT1-157 | GACATCCAGATGACCCAGTCTCCATCCTCCCTGTCTGCATCTGTAGGAGACCGTGTCACCAT |
| | CACTTGCCGGGCAAGTCAGAGCATTAGCAGCTATTTAAATTGGTACCAGCAGAAACCAGGGA |
| | AAGCCCCTAAGCTCCTGATCGGGGGTGTGTCCGGGTTGCAAAGTGGGGTCCCATCACGTTTC |
| | AGTGGCAGTGGATCTGGGACAGATTTCACTCTCACCATCAGCAGTCTGCAACCTGAAGATTT |
| | TGCTACGTACTACTGTATGCAGTGGTCTCGGCCGCCTCGGACGTTCGGCCAAGGGACCAAGG |
| | TGGAAATCAAACGG (SEQ ID NO: 572) |
| ABT1-158 | GACATCCAGATGACCCAGTCTCCATCCTCCCTGTCTGCATCTGTAGGAGACCGTGTCACCAT |
| | CACTTGCCGGGCAAGTAGGTCTATTGGGCGTGGGTTAAATTGGTACCAGCAGAAACCAGGGA |
| | AAGCCCCTAAGCTCCTGATCGGGGGGTGGTCCGGGTTGCAAAGTGGGGTCCCATCACGTTTC |
| | AGTGGCAGTGGATCTGGGACAGATTTCACTCTCACCATCAGCAGTCTGCAACCTGAAGATTT |
| | TGCTACGTACTACTGTGCTCAGGCGTCGCCGCTTCCGACGTTCGGCCAAGGGACCAAGGTGG |
| | AAATCAAACGG (SEQ ID NO: 573) |
| ABT1-159 | GACATCCAGATGACCCAGTCTCCATCCTCCCTGTCTGCATCTGTAGGAGACCGTGTCACCAT |
| | CACTTGCCGGGCAAGTAGTCCTATTGGTATGGATTTATTTTGGTACCAGCAGAAACCAGGGA |
| | AAGCCCCTAGGCTCCTGATCGATGGTGTGTCCGGTTTGCAAAGTGGGGTCCCATCACGTTTC |
| | AGTGGCAGTGGATCTGGGACAGATTTCACTCTCACCATCAGCAGTCTGCAACCTGAAGATTT |
| | TGCTACGTACTACTGTTCTCAGCATTGGCCTGCGCCTCTGACGTTCGGCCAAGGGACCAAGG |
| | TGGAAATCAAACGG (SEQ ID NO: 574) |
| ABT1-160 | GACATCCAGATGACCCAGTCTCCATCCTCCCTGTCTGCATCTGTAGGAGACCGTGTCACCAT |
| | CACTTGTCGGGCAAGTACTGAGATTGTGCGTAATTTACGGTGGTACCAGCAGAAACCAGGGA |
| | AAGCCCCTAATCTCCTGATCTGGGGGGGTTCCACTTTGCAAAGTGGGGTCCCATCACGTTTC |
| | AGTGGCAGTGGATCTGGGACAGATTTCACTCTCACCATCAGCAGTCTGCAACCTGAAGATTT |
| | TGCTACGTACTACTGTGTTCAGGGTTATTCTTTGCCTGTTACGTTCGGCCAAGGGACCAAGG |
| | TGGAAATCAAACGG (SEQ ID NO: 575) |
| ABT1-161 | GACATCCAGATGACCCAGTCTCCATCCTCCCTGTCTGCATCTGTAGGAGACCGTGTCACCAT |
| | CACTTGCCGGGCAAGTCATGCTATTACTGGTAGTTTACGTTGGTACCAGCAGAAACCAGGGA |
| | AAGCCCCTAAGCTCCTGATCAGTGGTGGGTCCGTGTTGCAAAGTGGGGTCCCATCACGTTTC |
| | AGTGGCAGTGGATCTGGGACAGATTTCACTCTCACCATCAGCAGTCTGCAACCTGAAGATTT |
| | TGCTACGTACTACTGTGCTCAGTGGTTGGGGGGGCCTATGACGTTCGGCCAAGGGACCAAGG |
| | TGGAAATCAAACGG (SEQ ID NO: 576) |
| ABT1-162 | GACATCCAGATGACCCAGTCTCCATCCTCCCTGTCTGCATCTGTAGGAGGCCGCGTCACCAT |
| | CACTTGCCGGGCAAGTCATTATATTAGGAATCGGTTACATTGGTACCAGCAGAAACCAGGGA |
| | AAGCCCCTAAGCTCCTGATCGCGCGTGGGTCCGCTTTGCAAAGTGGGGTCCCATCACGTTTC |
| | AGTGGCAGTGGATCTGGGACAGATTTCACTCTCACCATCAGCAGTCTGCAACCTGAAGATTT |
| | TGCTACGTACTACTGTGTGCAGGATGGTTATCTGCCTCCTACGTTCGGCCAAGGGACCAAGG |
| | TGGAAATCAAACGG (SEQ ID NO: 577) |
| ABT1-163 | GACATCCAGATGACCCAGTCTCCATCCTCCCTGTCTGCATCTGTAGGAGACCGTGTCACCAT |
| | CACTTGCCGGGCAAGTGGGAATATTGTGCATAATTTACGTTGGTACCAGCAGAAACCAGGGA |
| | AAGCCCCTAAGCTCCTGATCTATGCTGCATCCAGGTTGCAAAGTGGGGTCCCATCACGTTTC |
| | AGTGGCAGTGGATCTGGGACAGATTTCACTCTCACCATCAGCAGTCTGCAACCTGAAGATTT |
| | TGCTACGTACTACTGTGCGCAGGGGTATGAGTGGCCTCTTACGTTCGGCCAAGGGACCAAGG |
| | TGGAAATCAAACAG (SEQ ID NO: 578) |
| ABT1-164 | GACATCCAGATGACCCAGTCTCCATCCTCCCTGTCTGCATCTGTAGGAGACCGTGTCACCAT |
| | CACTTGCCGGGCAAGTCGTCCGATTGCTGGTAATTTACGGTGGTACCAGCAGAAACCAGGGA |
| | AAGCCCCTAAGCTCCTGATCTGGGGGGCGTCCTCGTTGCAAAGTGGGGTCCCATCACGTTTC |
| | AGTGGCAGTGGATCTGGGACAGATTTCACTCTCACCATCAGCAGTCTGCAACCTGAAGATTT |
| | TGCTACGTACTACTGTGTGCAGGGGTGGCAGTGGCCTATTACGTTCGGCCAAGGGACCAAGG |
| | TGGAAATCAAACGG (SEQ ID NO: 579) |
| ABT1-165 | GACATCCAGATGACCCAGTCTCCATCCTCCCTGTCTGCATCTGTAGGAGACCGTGTCACCAT |
| | CACTTGCCGGGCAAGTTCTTCGATTAGGGCGGGTTTAGCTTGGTACCAGCAGAAACCAGGGA |
| | AAGCCCCTAAGCTCCTGATCGGGCCTGAGTCCGGGTTGCAAAGTGGGGTCCCATCACGTTTC |
| | AGTGGCAGTGGATCTGGGACAGATTTCACTCTCACCATCAGCAGTCTGCAACCTGAAGATTT |
| | TGCTACGTACTACTGTGGGCAGGGGATTGATGGTCCTGCTACGTTCGGCCAAGGGACCAAGG |
| | TGGAAATCAAACGG (SEQ ID NO: 580) |
| ABT1-166 | GACATCCAGATGACCCAGTCTCCATCCTCCCTGTCTGCATCTGTAGGAGACCGTGTCACCAT |
| | CACTTGCCGGGCAAGTCAGAGCATTAGCAGCTATTTAAATTGGTACCAGCAGAAACCAGGGA |
| | AAGCCCCTAAGCTCCTGATCGGTGGTCTGTCCGGTTTGCAAAGTGGGGTCCCATCACGTTTC |
| | AGTGGCAGTGGATCTGGGACAGATTTCACTCTCACCATCAGCAGTCTGCAACCTGAAGATTT |
| | TGCTACGTACTACTGTGGTCAGTGGGCGCGTGCTCCTATGACGTTCGGCCAAGGGACCAAGG |
| | TGGAAATCAAACGG (SEQ ID NO: 581) |
| ABT1-167 | GACATCCAGATGACCCAGTCTCCATCCTCCCTGTCTGCATCTGTAGGAGACCGTGTCACCAT |
| | CACTTGCCGGGCAAGTCAGAGCATTAGCAGCTATTTAAATTGGTACCAGCAGAAACCAGGGA |
| | AAGCCCCTAAGCTCCTGATCGGTGGGCTGTCCGGTTTGCAAAGTGGGGTCCCATCACGTTTC |
| | AGTGGCAGTGGATCTGGGACAGATTTCACTCTCACCATCAGCAGTCTGCAACCTGAAGATTT |
| | TGCTACGTACTACTGTATGCAGTGGTGGCGGTATCCTCCTACGTTCGGCCAAGGGACCAAGG |
| | TGGAAATCAAACGG (SEQ ID NO: 582) |
| ABT1-168 | GACATCCAGATGACCCAGTCTCCATCCTCCCTGTCTGCATCTGTAGGAGACCGTGTCACCAT |
| | CACTTGCCGGGCAAGTCAGAGCATTAGCAGCTATTTAAATTGGTACCAGCAGAAACCAGGGA |
| | AAGCCCCTAAGCTCCTGATCGGGGGGCTGTCCGGTTTGCAAAGTGGGGTCCCATCACGTTTC |
| | AGTGGCAGTGGATCTGGGACAGATTTCACTCTCACCATCAGCAGTCTGCAACCTGAAGATTT |
| | TGCTACGTACTACTGTCTGCAGTGGTTTTCTGAGCCTGCTACGTTCGGCCAAGGGACCAAGG |
| | TGGAAATCAAACGG (SEQ ID NO: 583) |
| ABT1-169 | GACATCCAGATGACCCAGTCTCCATCCTCCCTGTCTGCATCTGTAGGAGACCGTGTCACCAT |
| | CACTTGCCGGGCAAGTCAGAGCATTAGCAGCTATTTAAATTGGTACCAGCAGAAACCAGGGA |
| | AAGCCCCTAAGCTCCTGATCGGTGGGTTGTCCGGGTTGCAAAGTGGGGTCCCATCACGTTTC |
| | AGTGGCAGTGGATCTGGGACAGATTTCACTCTCACCATCAGCAGTCTGCAACCTGAAGATTT |
| | TGCTACGTACTACTGTATGCAGTGGTGGCGGTGGCCTTCGACGTTCGGCCAAGGGACCAAGG |
| | TGGAAATCAAACGG (SEQ ID NO: 584) |
| ABT1-170 | GACATCCAGATGACCCAGTCTCCATCCTCCCTGTCTGCATCTGTAGGAGACCGTGTCACCAT |
| | CACTTGCCGGGCAAGTCAGAGCATTAGCAGCTATTTAAATTGGTACCAGCAGAAACCAGGGA |
| | AAGCCCCTAAGCTCCTGATCGGGGGTCGGTCCGGGTTGCAAAGTGGGGTCCCATCACGTTTC |
| | AGTGGCAGTGGATCTGGGACAGATTTCACTCTCACCATCAGCAGTCTGCAACCTGAAGATTT |
| | TGCTACGTACTACTGTAAGCAGTGGTATAGGTATCCTTCTACGTTCGGCCAAGGGACCAAGG |
| | TGGAAATCAAACGG (SEQ ID NO: 585) |
| ABT1-171 | GACATCCAGATGACCCAGTCTCCATCCTCCCTGTCTGCATCTGTAGGAGACCGTGTCACCAT |
| | CACTTGCCGGGCAAGTCAGAGCATTAGCAGCTATTTAAATTGGTACCAGCAGAAACCAGGGA |
| | AAGCCCCTAAGCTCCTGATCGGGGGGCGGTCCGGTTTGCAAAGTGGGGTCCCATCACGTTTC |
| | AGTGGCAGTGGATCTGGGACAGATTTCACTCTCACCATCAGCAGTCTGCAACCTGAAGATTT |
| | TGCTACGTACTACTGTATGCAGTGGTTTCGTCCGCCTAGGACGTTCGGCCAAGGGACCAAGG |
| | TGGAAATCAAACGG (SEQ ID NO: 586) |
| ABT1-172 | GACATCCAGATGACCCAGTCTCCATCCTCCCTGTCTGCATCTGTAGGAGACCGTGTCACCAT |
| | CACTTGCCGGGCAAGTCAGCGTATTCGTAATGGTTTAGAGTGGTACCAGCAGAAACCAGGGA |
| | AAGCCCCTAAGCTCCTGATCTGGGGGTCGTCCCGTTTGCAAAGTGGGGTCCCATCACGTTTC |
| | AGTGGCAGTGGATCTGGGACAGATTTCACTCTCACCATCAGCAGTCTGCAACCTGAAGATTT |
| | TGCTACGTACTACTGTGCGCAGACGGTTTGGGGTCCTGCGACGTTCGGCCAAGGGACCAAGG |
| | TGGAAATCAAACGG (SEQ ID NO: 587) |
| ABT1-221 | GACATCCAGATGACCCAGTCTCCATCCTCCCTGTCTGCATCTGTAGGGGACCGTGTTACCAT |
| | CACTTGCCGGGCAAGTCAGGATATTTGGCCTTATTTAATGTGGTATCAGCAGAAACCAGGGA |
| | AAGCCCCTAAGCTCCTAATCTATTATTCTTCCATGTTGCAAAGTGGGGTCCCATCACGTTTC |
| | AGTGGCAGTGGATCTGGGACAGATTTCACTCTCACCATCAGCAGTCTGCAACCTGAAGATTT |
| | TGCTACGTACTACTGTCAACAGTTTAGGAGGTGGCCTTATACGTTCGGCCAAGGGACCPAGG |
| | TGGAAATCAAACGG (SEQ ID NO: 588) |

ABT2 VH dAbs

| | |
|---|---|
| ABT2-10 | GAGGTGCAGCTGTTGGAGTCTGGGGGAGGCTTGGTACAGCCTGGGGGGTCCCTGCGTCTCTC |
| | CTGTACAGCCTCCGGATTCACCTTTAATAGGTATAATATGGCGTGGGCCCGCCAGGCTCCAG |
| | GGAAGGGTCTAGAGTGGGTCTCAGAGATTGATCTTAAGGGTAGTCAGACATACTACGCAGAC |
| | TCCGTGAAGGGCCGGTTCACCATCTCCCGCGACAATTCCAAGAACACGCTGTATCTGCAAAT |
| | GAACAGCCTGCGTGCCGAGGACACCGCGGTATATTACTGTGCGAAAGTGAGTATTAGTGCGT |
| | ATCATATGTTTGACTACTGGGGTCAGGGAACCCTGGTCACCGTCTCGAGC (SEQ ID NO: |
| | 589) |
| ABT2-11 | GAGGTGCAGCTGTTGGAGTCTGGGGGAGGCTTGGTACAGCCTGGGGGGTCCCTGCGTCTCTC |
| | CTGTGCAGCCTCCGGATTCACCTTTGATAATTATTCTATGACGTGGGTCCGCCAGGCTCCAG |
| | GGAAGGGTCTGGAGTGGGTCTCAGCTATTAGTGGTAGTGGTGGTAGCACATACTACGCAGAC |
| | TCCGTGAAGGGCCGGTTCACCATCTCCCGCGACAATTCCAAGAACACGCTGTATCTGCAAAT |
| | GAACAGCCTGCGTGCCGAGGATACCGCGGTATATTACTGTGCGAAATGTATTGATCGTTTGC |
| | CTTGTCTGTTTGACTACTGGGGTCAGGGAACCCTGGTCACCGTCTCGAGC (SEQ ID NO: |
| | 590) |
| ABT2-12 | GAGGTGCAGCTGTTGGAGTCTGGGGGAGGCTTGGTACAGCCTGGGGGGTCCCTGCGTCTCTC |
| | CTGTGCAGCCTCCGGATTCACCTTTACGGGTTATGATATGGCTTGGGTCCGCCAGGCTCCAG |
| | GGAAGGGTCTAGAGTGGGTCTCAGTGATTTATGCTTATGGTGAGTCTACATACTACGCAGAC |
| | TCCGTGAAGGGCCGGTTCACCATCTCCCGCGACAATTCCAAGAACACGCTGTATCTGCAAAT |
| | GAACAGCCTGCGTGCCGAGGACACCGCGGTATATTACTGTGCGAAAATGACTTCTGCTTCTT |
| | TTGACTACTGGGGTCAGGGAACCCTGGTCACCGTCTCGAGC (SEQ ID NO: 591) |
| ABT2-13 | GAGGTGCAGCTGTTGGAGTCTGGGGGAGGCTTGGTACAGCCTGGGGGGTCCCTGCGTCTCTC |
| | CTGTGCAGCCTCCGGATTCACCTTTCGGGATTATGTTATGTATTGGGCCCGCCAGGCTCCAG |
| | GGAAGGGTCTAGAGTGGGTCTCAAGGATTGATCCTATGGGTAGTTCGACATACTACGCAGAC |
| | TCCGTGAAGGGCCGGTTCACCATCTCCCGCGACAATTCCAAGAACACGCTGTATCTGCAAAT |
| | GAACAGCCTGCGTGCCGAGGACACCGCGGTATATTACTGTGCGAAACCTGAGGGTAATTTTG |
| | ACTACTGGGGTCAGGGAACCCTGGTCACCGTCTCGAGC (SEQ ID NO: 592) |
| ABT2-14 | GAGGTGCAGCTGTTGGAGTCTGGGGGAGGCCTGGTACAGCCTGGGGGGTCCCTGCGTCTCTC |
| | CTGTGCAGCCTCCGGATTCACCTTTGCGGATTATGATATGTCTTGGGTCCGCCAGGCTCCAG |
| | GGAAGGGTCTAGAGTGGGTCTCAACTATTTATGGTTTTGGTTTTGCGACATACTACGCAGAC |
| | TCCGTGAAGGGCCGGTTCACCATCTCCCGCGACAATTCCAAGAACACGCTGTATCTGCAAAT |
| | GAACAGCCTGCGTGCCGAGGACACCGCGGTATATTACTGTGCGAAAACGTTGGCTGGGGGGT |
| | TTGACTACTGGGGTCAGGGAACCCTGGTCACCGTCTCGAGC (SEQ ID NO: 593) |
| ABT2-15 | GAGGTGCAGCTGTTGGAGTCTGGGGGAGGCTTGGTACAGCCTGGGGGGTCCCTGCGTCTCTC |
| | CTGTGCAGCCTCCGGATTCACCTTTAGGGCTTATGATATGGGGTGGGTCCGCCAGGCTCCAG |
| | GGAAGGGTCTAGAGTGGGTCTCAGTTATTTATGCGTGGGGTACTAGTACATACTACGCAGAC |
| | TCCGTGAAGGGCCGGTTCACCATCTCCCGCGACAATTCCAAGAACACGCTGTATCTGCAAAT |
| | GAACAGCCTGCGTGCCGAGGACACCGCGGTATATTACTGTGCGAAAATGGCTAATGCTAAGT |
| | TTGACTACTGGGGTCAGGGAACCCTGGTCACCGTCTCGAGC (SEQ ID NO: 594) |
| ABT2-16 | GAGGTGCAGCTGTTGGAGTCTGGGGGAGGCTTGGTACAGCCTGGGGGGTCCCTGCGTCTCTC |
| | CTGTGCAGCCTCCGGATTCACCTTTAGGGCTTATGATATGGGGTGGGTCCGCCAGGCTCCAG |
| | GGAAGGGTCTAGAGTGGGTCTCAGTTATTTATGCGTGGGGTACTAGTACATACTACGCAGAC |
| | TCCGTGAAGGGCCGGTTCACCATCTCCCGCGACAATTCCAAGAACACGCTGTATCTGCAAAT |
| | GAACAGCCTGCGTGCCGAGGACACCGCGGTATATTACTGTGCGAAAAATAAGGGGCATGGGC |
| | AGTTTGACTACTGGGGTCAGGGAACCCTGGTCACCGTCTCGAGC (SEQ ID NO: 595) |
| ABT2-17 | GAGGTGCAGCTGTTGGAGTCTGGGGGAGGCTTGGTACAGCCTGGGGGGTCCCTGCGTCTCTC |
| | CTGTGCAGCCTCCGGATTCACCTTTAGGGCTTATGATATGGGGTGGGTCCGCCAGGCTCCAG |
| | GGAAGGGTCTAGAGTGGGTCTCAGTTATTTATGCGTGGGGTACTAGTACATACTACGCAGAC |
| | TCCGTGAAGGGCCGGTTCACCATCTCCCGCGACAATTCCAAGAACACGCTGTATCTGCAAAT |
| | GAACAGCCTGCGTGCCGAGGATACCGCGGTATATTACTGTGCGAAAATGAAGGGGAGTACTT |
| | TTGACTACTGGGGTCAGGGAACCCTGGTCACCGTCTCGAGC (SEQ ID NO: 596) |
| ABT2-19 | GAGGTGCAGCTGTTGGAGTCTGGGGGAGGCTTGGTACAGCCTGGGGGGTCCCTGCGTCTCTC |
| | CTGTGCAGCCTCCGGATTCACCTTTAGGGCTTATGATATGGGGTGGGTCCGCCAGGCTCCAG |
| | GGAAGGGTCTAGAGTGGGTCTCAGTTATTTATGCGTGGGGTACTAGTACATACTACGCAGAC |
| | TCCGTGAAGGGCCGGTTCACCATCTCCCGCGACAATTCCAAGAACACGCTGTATCTGCAAAT |
| | GAACAGCCTGCGTGCCGAGGACACCGCGGTATATTACTGTGCGAAAACGTCTCCGGAGTCTT |
| | TTGACTACTGGGGTCAGGGAACCCTGGTCACCGTCTCGAGC (SEQ ID NO: 597) |
| ABT2-20 | GAGGTGCAGCTGTTGGAGTCTGGGGGAGGCTTGGTACAGCCTGGGGGGTCCCTGCGTCTCTC |
| | CTGTGCAGCCTCCGGATTCACCTTTAGGGCTTATGATATGGGGTGGGTCCGCCAGGCTCCAG |
| | GGAAGGGTCTAGAGTGGGTCTCAGTTATTTATGCGTGGGGTACTAGTACATACTACGCAGAC |
| | TCCGTGAAGGGCCGGTTCACCATCTCCCGCGACAATTCCAAGAACACGCTGTATCTGCAAAT |
| | GAACAGCCTGCGTGCCGAGGACTCCGCGGTATATTACTGTGCGAAACCTAGTATTGATGGTT |
| | TTGACTACTGGGGTCAGGGAACCCTGGTCACCGTCTCGAGC (SEQ ID NO: 598) |
| ABT2-21 | GAGGTGCAGCTGTTGGAGTCTGGGGGAGGCTTGGTACAGCCTGGGGGGTCCCTGCGTCTCTC |
| | CTGTGCAGCCTCCGGATTCACCTTTAGGGCTTATGATATGGGGTGGGTCCGCCAGGCTCCAG |
| | GGAAGGGTCTAGAGTGGGTCTCAGTTATTTATGCGTGGGGTACTAGTACATACTACGCAGAC |
| | TCCGTGAAGGGCCGGTTCACCATCTCCCGCGACAATTCCAAGAACACGCTGTATCTGCAAAT |
| | GAACAGCCTGCGTGCCGAGGACACCGCGGTATATTACTGTGCGAAAGTTAGTAGTGATACTT |
| | TTGACTACTGGGGTCAGGGAACCCTGGTCACCGTCTCGAGC (SEQ ID NO: 599) |
| ABT2-22 | GAGGTGCAGCTGTTGGAGTCTGGGGGAGGCTTGGTACAGCCTGGGGGGTCCCTGCGTCTCTC |
| | CTGTGCAGCCTCCGGATTCACCCTTAGGGCTTATGATATGGGGTGGGTCCGCCAGGCTCCAG |
| | GGAAGGGTCTAGAGTGGGTCTCAGTTATTTATGCGTGGGGTACTAGTACATACTACGCAGAC |
| | TCCGTGAAGGGCCGGTTCACCATCTCCCGCGACAATTCCAAGAACACGCTGTATCTGCAAAT |
| | GAACAGCCTGCGTGCCGAGGACACCGCGGTATATTACTGTGCGAAAGGGCCTTTGTCTACGC |
| | ATGATAGTTTTGACTACTGGGGTCAGGGAACCCTGGTCACCGTCTCGAGC (SEQ ID NO: |
| | 600) |
| ABT2-23 | GAGGTGCAGCTGTTGGAGTCTGGGGGAGGCTTGGTACAGCCTGGGGGGTCCCTGCGTCTCTC |
| | CTGTGCAGCCTCCGGATTCACCTTTAGGGCTTATGATATGGGGTGGGTCCGCCAGGCTCCAG |
| | GGAAGGGTCTAGAGTGGGTCTCAGTTATTTATGCGTGGGGTACTAGTACATACTACGCAGAC |
| | TCCGTGAAGGGCCGGTTCACCATCTCCCGCGACAATTCCAAGAACACGCTGTATCTGCAAAT |
| | GAACAGCCTGCGTGCCGAGGACACCGCGGTGTATTACTGTGCGAAAGGGAATTCGAGTTTGG |
| | ATCCGAATTTTGACTACTGGGGTCAGGGAACCCTGGTCACCGTCTCGAGC (SEQ ID |
| | NO: 601) |
| ABT2-24 | GAGGTGCAGCTGTTGGAGTCTGGGGGAGGCTTGGTACAGCCTGGGGGGTCCCTGCGTCTCTC |
| | CTGTGCAGCCTCCGGATTCACCTTTAGGGCTTATGATATGGGGTGGGTCCGCCAGGCTCCAG |
| | GGAAGGGTCTAGAGTGGGTCTCAGTTATTTATGCGTGGGGTACTAGTACATACTACGCAGAC |
| | TCCGTGAAGGGCCGGTTCACCATCTCCCGCGACGATTCCAAGAACACGCTGTATCTGCAAAT |
| | GAACAGCCTGCGTGCCGAGGATACCGCGGTATATTACTGTGCGAAAACTCAGCCTAGGTCTC |
| | TGGATAATTTTGACTACTGGGGTCAGGGAACCCTGGTCACCGTCTCGAGC (SEQ ID |
| | NO: 602) |
| ABT2-25 | GAGGTGCAGCTGTTGGAGTCTGGGGGAGGCTTGGTACAGCCTGGGGGGTCCCTGCGTCTCTC |
| | CTGTGCAGCCTCCGGATTCACCTTTTCTAAGTATAAGATGTCGTGGGTCCGCCAGGCTCCAG |
| | GGAAGGGTCTAGAGTGGGTCTCAAGTATTAGTAGTTCTGGTTCTACTACATACTACGCAGAC |
| | TCCGTGAAGGGCCGGTTCACCATCTCCCGCGACAATTCCAAGAACACGCTGTATCTGCAAAT |
| | GGACAGCCTGCGTGCCGAGGACACCGCGGTATATTACTGTGCGAAACCTCTGTTGTTGGATG |
| | TGGAGTTTGACTACTGGGGTCAGGGAACCCTGGTCACCGTCTCGAGC (SEQ ID NO: |
| | 603) |
| ABT2-26 | GAGGTGCAGCTGTTGGAGTCTGGGGGAGGCTTGGTACAGCCTGGGGGGTCCCTGCGTCTCTC |
| | CTGTGCAGCCTCCGGATTCACCTTTTCTAATTATAAGATGTCGTGGGTCCGCCAGGCTCCAG |
| | GGAAGGGTCTAGAGTGGGTCTCAAGTATTAATACTTCTGGTTCTACTACATACTACGCAGAC |
| | TCCGTGAAGGGCCGGTTCACCATCTCCCGCGACAATTCCAAGAACACGCTGTATCTGCAAAT |
| | GGACAGCCTGCGTGCCGAGGACACCGCGGTATATTACTGTGCGAAACCTCTGTTGTTGGATG |
| | TGGAGTTTGACTACTGGGGTCAGGGAACCCTGGTCACCGTCTCGAGC (SEQ ID NO: |
| | 604) |
| ABT2-27 | GAGGTGCAGCTGTTGGAGTCTGGGGGAGGCTTGGTACAGCCTGGGGGGTCCCTGCGTCTCTC |
| | CTGTGCAGCCTCCGGATTCACCTTTGCGCATTATTCGATGTGGTGGGTCCGCCAGGCTCCAG |
| | GGAAGGGTCTAGAGTGGGTCTCACGTATTGGGTCTCCGGGTAATGATACATACTACGCAGAC |
| | TCCGTGAAGGGCCGGTTCACCATCTCCCGCGACAATTCCAAGAACACGCTGTATCTGCAAAT |
| | GAACAGCCTGCGTGCCGAGGACACCGCGGTATATTACTGTGCGAAATTTGGGTTTAGGTCTG |
| | CGGAGTCTTTTGACTACTGGGGTCAGGGAACCCTGGTCACCGTCTCGAGC (SEQ ID |
| | NO: 605) |
| ABT2-28 | GAGGTGCAGCTGTTGGAGTCTGGGGGAGGCTTGGTACAGCCTGGGGGGTCCCTGCGTCTCTC |
| | CTGTGCAGCCTCCGGATTCACCTTTACGGGTTATGATATGGCTTGGGTCCGCCAGGCTCCAG |
| | GGAAGGGTCTAGAGTGGGTCTCAGTGATTTATGCTTATGGTGAGTCTACATACTACGCAGAC |
| | TCCGTGAAGGGCCGGTTCACCATCTCCCGCGACAATTCCAAGAACACGCTGTATCTGCAAAT |
| | GAACAGCCTGCGTGCCGAGGATACCGCGGTATATTACTGTGCGAAACCTGTGCAGGGGTCGT |
| | TGTTGGGGTTTGACTACTGGGGTCAGGGAACCCTGGTCACCGTCTCGAGC (SEQ ID |
| | NO: 606) |
| ABT2-29 | GAGGTGCAGCTGTTGGAGTCTGGGGGAGGCTTGGTACAGCCTGGGGGGTCCCTGCGTCTCTC |
| | CTGTGCAGCCTCCGGATTCACCTTTAGGGCTTATGATATGGGGTGGGTCCGCCAGGCTCCAG |
| | GGAAGGGTCTAGAGTGGGTCTCAGTTATTTATGCGTGGGGTACTAGTACATACTACGCAGAC |
| | TCCGTGAAGGGCCGGTTCACCATCTCCCGCGACAATTCCAAGAACACGCTGTATCTGCAAAT |
| | GAACAGCCTGCGTGCCGAGGACACCGCGGTATATTACTGTGCGAAAGCGACGTTTGGGAATC |
| | TGGAGGAGTCGTTTGACTACTGGGGTCAGGGAACCCTGGTCACCGTCTCGAGC (SEQ ID |
| | NO: 607) |
| ABT2-30 | GAGGTGCAGCTGTTGGAGTCTGGGGGAGGCTTGGTACAGCCTGGGGGGTCCCTGCGTCTCTC |
| | CTGTGCAGCCTCCGGATTCACCTTTAGGGCTTATGATATGGGGTGGGTCCGCCAGGCTCCAG |
| | GGAAGGGTCTAGAGTGGGTCTCAGTTATTTATGCGTGGGGTACTAGTACATACTACGCAGAC |
| | TCCGTGAAGGGCCGGTTCACCATCTCCCGCGACAATTCCAAGAACACGCTGTATCTGCAAAT |
| | GAACAGCCTGCGTGCCGAGGACACCGCGGTATATTACTGTGCGAAATATTCGGCTGGGCCTT |
| | TTGGGCAGACGCTGTTTGACTACTGGGGTCAGGGAACCCTGGTCACCGTCTCGAGC (SEQ |
| | ID NO: 608) |
| ABT2-31 | GAGGTGCAGCTGTTGGAGTCTGGGGGAGGCTTGGTACAGCCTGGGGGGTCCCTGCGTCTCTC |
| | CTGTGCAGCCTCCGGATTCACCTTTACGGGTTATGATATGGCTTGGGTCCGCCAGGCTCCAG |
| | GGAAGGGTCTAGAGTGGGTCTCAGTGATTTATGCTTATGGTGAGTCTACATACTACGCAGAC |
| | TCCGTGAAGGGCCGGTTCACCATCTCCCGCGACAATTCCAAGAACACGCTGTATCTGCAAAT |
| | GAACAGCCTGCGTGCCGAGGACACCGCGGTATATTACTGTGCGAAAAAGAGTAAGGGGCCTT |
| | CTGGTCTTCGTACGTTTGACTACTGGGGTCAGGGAACCCTGGTCACCGTCTCGAGC (SEQ |
| | ID NO: 609) |
| ABT2-32 | GAGGTGCAGCTGTTGGAGTCTGGGGGAGGCTTGGTACAGCCTGGGGGGTCCCTGCGTCTCTC |
| | CTGTGCAGCCTCCGGATTCACCTTTACGGGTTATGATATGGCTTGGGTCCGCCAGGCTCCAG |
| | GGAAGGGTCTAGAGTGGGTCTCAGTGATTTATGCTTATGGTGAGTCTACATACTACGCAGAC |
| | TCCGTGAAGGGCCGGTTCACCATCTCCCGCGACAATTCCAAGAACACGCTGTATCTGCAAAT |
| | GAACAGCCTGCGTGCCGAGGACACCGCGGTATATTACTGTGCGAAAACTACGCCGAAGTCTA |
| | ATCTGCGTGATTTTGACTACTGGGGTCAGGGAACCCTGGTCACCGTCTCGAGC (SEQ ID |
| | NO: 610) |
| ABT2-33 | GAGGTGCAGCTGTTGGAGTCTGGGGGAGGCTTGGTACAGCCTGGGGGGTCCCTGCGTCTCTC |
| | CTGTGCAGCCTCCGGATTCACCTTTGAGGATTATGCTATGGCTTGGGCCCGCCAGGCTCCAG |
| | GGAAGGGTCTAGAGTGGGTCTCATCTATTTTGGCGGATGGTCATTCGACACACTACGCAGAC |
| | TCCGTGAAGGGCCGGTTCACCATCTCCCGCGACAATTCCAAGAACACGCTGTATCTGCAAAT |
| | GAACAGCCTGCGTGCCGAGGACACCGCGGTATATTACTGTGCGAAACCTTATGCGGCGGTTT |
| | TTAATCGTGTGTATTTTGACTACTGGGGTCAGGGAACCCTGGTCACCGTCTCGAGC (SEQ |
| | ID NO: 611) |
| ABT2-35 | GAGGTGCAGCTGTTGGAGTCTGGGGGAGGCTTGGTACAGCCTGGGGGGTCCCTGCGTCTCTC |
| | CTGTGCAGCCTCCGGATTCACCTTTGGTGAGTATGATATGGCTTGGGTCCGCCAGGCTCCAG |
| | GGAAGGGTCTAGAATGGGTCTCAGTTATTTATGCGTGGGGTACTAGTACATACTACGCAGAC |
| | TCCGTGAAGGGCCGGTTCACCATCTCCCGCGACAATTCCAAGAACACGCTGTATCTGCAAAT |
| | GAACAGCCTGCGTGCCGAGGACACCGCGGTATATTACTGTGCGAAAATGGGTGGTGGGCTTG |
| | TTTCTCTTCCTCAGTCTAAGTTTGACTACTGGGGTCAGGGAACCCTGGTCACCGTCTCGAGC |
| | (SEQ ID NO: 612) |
| ABT2-36 | GAGGTGCAGCTGTTGGAGTCTGGGGGAGGCTTGGTACAGCCTGGGGGGTCCCTGCGTCTCTC |
| | CTGTGCAGCCTCCGGATTCACCTTTCAGTCGTATGATATGTGTTGGGTCCGCCAGGCTCCAG |
| | GGAAGGGTCTAGAGTGGGTCTCATGTATTTATGCTTATGGTACGAGTACATACTACGCAGAC |
| | TCCGTGAAGGGCCGGTTCACCATCTCCCGCGACAATTCCAAGAACACGCTGTATCTGCAAAT |
| | GAACAGCCTGCGTGCCGAGGACACCGCGGTATATTACTGTGCGAAACCTGCTGTTGGTACGC |
| | ATCGTCAGCGGGCTGTTTTTGACTACTGGGGTCAGGGAACCCTGGTCACCGTCTCGAGC |
| | (SEQ ID NO: 613) |
| ABT2-37 | GAGGTGCAGCTGTTGGAGTCTGGGGGAGGCTTGGTACAGCCTGGGGGGTCCCTGCGTCTCTC |
| | CTGTGCAGCCTCCGGATTCACCTTTTCTCGGTATTCGATGATGTGGGTCCGCCAGGCTCCAG |
| | GGAAGGGTCTAGAGTGGGTCTCAGGGATTGATTCTACGGGTGTTCATACATACTACGCAGAC |
| | TCCGTGAAGGGCCGGTTCACCATCTCCCGCGACAATTCCAAGAACACGCTGTATCTGCAAAT |
| | GAACAGCCTGCGTGCCGAGGACACCGCGGTATATTACTGTGCGAAAGGTAGTTATGCTCTTT |
| | GGGGTCGTGAGCCGACTTTTGACTACTGGGGTCAGGGAACCCTGGTCACCGTCTCGAGC |
| | (SEQ ID NO: 614) |
| ABT2-38 | GAGGTGCAGCTGTTGGAGTCTGGGGGAGGCTTGGTACAGCCTGGGGGGTCCCTGCGTCTCTC |
| | CTGTGCAGCCTCCGGATTCACCTTTGATCGGTATGCGATGGGGTGGGTCCGCCAGGTTCCAG |
| | GGAAGGGTCTAGAGTGGGTCTCAACGATTAATGTTCCGGGTACGTTTACATACTACGCAGAC |
| | TCCGTGAAGGGCCGGTTCACCATCTCCCGCGACAATTCCAAGAACACGCTGTATCTGCAAAT |
| | GAACAGCCTGCGTGCCGAGGATACCGCGGTATATTACTGTGCGAAAGGGCATTTTCCGCGTG |
| | GTGGGGCGATTGTTCCTTTTGACTACTGGGGTCAGGGAACCCTGGTCACCGTCTCGAGC |
| | (SEQ ID NO: 615) |
| ABT2-39 | GAGGTGCAGCTGTTGGAGTCTGGGGGAGGCTTGGTACAGCCTGGGGGGTCCCTGCGTCTCTC |
| | CTGTGCAGCCTCCGGATTCACCTTTAGGGCTTATGATATGGGGTGGGTCCGCCAGGCTCCAG |
| | GGAAGGGTCTAGAGTGGGTCTCAGTTATTTATGCGTGGGGTACTAGTACATACTACGCAGAC |
| | TCCGTGAAGGGCCGGTTCACCATCTCCCGCGACAATTCCAAGAACACGCTGTATCTGCAAAT |
| | GAACAGCCTGCGTGCCGAGGACACCGCGGTATATTACTGTGCGAAAATTGATCGGGATGCGA |
| | GTCTGCCGACGGGGGAGGGGTTTGACTACTGGGGTCAGGGAACCCTGGTCACCGTCTCGAGC |
| | (SEQ ID NO: 616) |
| ABT2-40 | GAGGTGCAGCTGTTGGAGTCTGGGGGAGGCTTGGTACAGCCTGGGGGGTCCCTGCGTCTCTC |
| | CTGTGCAGCCTCCGGATTCACCTTTAGGGCTTATGATATGGGGTGGGTCCGCCAGGCTCCAG |
| | GGAAGGGTCTAGAGTGGGTCTCAGTTATTTATGCGTGGGGTACTAGTACATACTACGCAGAC |
| | TCCGTGAAGGGCCGGTTCACCATCTCCCGCGACAATTCCAAGAACACGCTGTATCTGCAAAT |
| | GAACAGCCTGCGTGCCGAGGACACCGCGGTATATTACTGTGCGAAACCGTGTGCGATTTGTG |
| | ATACGGATTCGTTGGGTTTTGACTACTGGGGTCAGGGAACCCTGGTCACCGTCTCGAGC |
| | (SEQ ID NO: 617) |
| ABT2-41 | GAGGTGCAGCTGTTGGAGTCTGGGGGAGGCTTGGTACAGCCTGGGGGGTCCCTGCGTCTCTC |
| | CTGTGCAGCCTCCGGATTCACCTTTAGGGCTTATGATATGGGGTGGGTCCGCCAGGCTCCAG |
| | GGAAGGGTCTAGAGTGGGTCTCAGTTATTTATGCGTGGGGTACTAGTACATACTACGCAGAC |
| | TCCGTGAAGGGCCGGTTCACCATCTCCCGCGACAATTCCAAGAACACGCTGTATCTGCAAAT |
| | GAACAGCCTGCGTGCCGAGGACACCGCGGTATATTACTGTGCGAAAACTACTGATATTAATA |
| | AGAGGTGGCCTACTGGGTTTGACTACTGGGGTCAGGGAACCCTGGTCACCGTCTCGAGC |
| | (SEQ ID NO: 618) |
| ABT2-64 | GAGGTGCAGCTGTTGGAGTCTGGGGGAGGCTTGGTACAGCCTGGGGGGTCCCTGCGTCTCTC |
| | CTGTGCAGCCTCCGGATTCACCTTTGATGATTATGGGATGGGTTGGGTCCGCCAGGCTCCAG |
| | GGAAGGGTCTTGAGTGGGTCTCACTTATTTATCCGTTTGGTGGGGGGACATACTACGCAGAC |
| | TCCGTGAAGGGCCGGTTCACCATCTCCCGCGACAATTCCAAGAACACGCTGTATCTGCAAAT |
| | GAACAGCCTGCGTGCCGAGGATACCGCGGTATATTACTGTGCGAAAGTTACGCAGACTGGTA |
| | AGTTTGACTACTGGGGTCAGGGAACCCTGGTCACCGTCTCGAGC (SEQ ID NO: 619) |
| ABT2-65 | GAGGTGCAGCTGTTGGAGTCTGGGGGAGGCTTGGTACAGCCTGGGGGGTCCCTGCGTCTCTC |
| | CTGTGCAGCCTCCGGATTCACCTTTGAGGATTATCAGATGGGGTGGGTCCGCCAGGCTCCAG |
| | GGAAGGGTCTAGAGTGGGTCTCATCGATTTCGGCTATGGGTAATCGGACATACTACGCAGAC |
| | TCCGTGAAGGGCCGGTTCACCATCTCCCGCGACGATTCCAAGAACACGCTGTATCTGCAAAT |
| | GAACAGCCTGCGTGCCGAGGACACCGCGGTATATTACTGTGCGAAAAATCTGGTTCGTACTC |
| | AGTCTAAGATGTGGATGTTTGACTACTGGGGTCAGGGAACCCTGGTCACCGTCTCGAGC |
| | (SEQ ID NO: 620) |
| ABT2-65-1 | GAGGTGCAGCTGTTGGAGTCTGGGGGAGGCTTGGTACAGCCTGGGGGGTCCCTGCGTCTCTC |
| | CTGTGCAGCCTCCGGATTCACCTTTGAGGATTATCAGATGGGGTGGGTCCGCCAGGCTCCAG |
| | GGAAGGGTCTAGAGTGGGTCTCATCGATTTCGGCTATGGGTAATCGGACATACTACGCAGAC |
| | TCCGTGAAGGGCCGGTTCACCATCTCCCGCGACGATTCCAAGAACACGCTGTATCTGCAAAT |
| | GAAGAGCCTGCGTGCCGAGGACACCGCGGTATATTACTGTGCGCAAAATCTGGTTCGTACTC |
| | AGTCTAAGATGTGGATGTTTGACTACTGGGGTCAGGGAACCCTGGTCACCGTCTCGAGC |
| | (SEQ ID NO: 621) |
| ABT2-65-2 | GAGGTGCAGCTGTTGGAGTCTGGGGGAGGCTTGGTACAGCCTGGGGGGTCCCTGCGTCTCTC |
| | CTGTGCAGCCTCCGGATTCACCTTTTCTACTTATAATATGGGTTGGGTCCGCCAGGCTCCAG |
| | GGAAGGGTCTAGAGTGGGTCTCATCGATTTCGGCTATGGGTAATCGGACATACTACGCAGAC |
| | TCCGTGAAGGGCCGGTTCACCATCTCCCGCGACGATTCCAAGAACACGCTGTATCTGCAAAT |
| | GAACAGCCTGCGTGCCGAGGACACCGCGGTATATTACTGTGCGAATAATCTGGTTCGTACTC |
| | AGTCTAAGATGTGGATGTTTGACTACTGGGGTCAGGGAACCCTGGTCACCGTCTCGAGC |
| | (SEQ ID NO: 622) |
| ABT2-65-6 | GAGGTGCAGCTGTTGGAGTCTGGGGGAGGCTTGGTACAGCCTGGGGGGTCCCTGCGTCTCTC |
| | CTGTGCAGCCTCCGGATTCACCTTTGAGGATTATCAGATGGGGTGGGTCCGCCAGGCTCCAG |
| | GGAAGGGTCTAGAGTGGGTCTCATCGATTTCGGCTATGGGTAATCGGACATACTACGCAGAC |
| | TCCGTGAAGGGCCGGTTCACCATCTCCCGCGACGATTCCAAGAACACGCTGTATCTGCAAAT |
| | GAACAGCCTGCGTGCCGAGGACACCGCGGTATATTACTGTGCGCAAAATCTGGTTCGTACTC |
| | AGTCTAAGATGTGGATGTTTGACTACTGGGGTCAGGGAACCCTGGTCACCGTCTCGAGC |
| | (SEQ ID NO: 623) |
| ABT2-65-7 | GAGGTGCAGCTGTTGGAGTCTGGGGGAGGCTTGGTACAGCCTGGGGGGTCCCTGCGTCTCTC |
| | CTGTGCAGCCTCCGGATTCACCTTTGAGGATTATCAGATGGGGTGGGTCCGCCAGGCTCCAG |
| | GGAAGGGTCTAGAGTGGGTCTCATCGATTTCGGCTACGGGTAATCGGACATACTACGCAGAC |
| | TCCGTGAAGGGCCGGTTCACCATCTCCCGCGACGATTCCAAGAACACGCTGTATCTGCAAAT |
| | GAACAGCCTGCGTGCCGAGGACACCGCGGTATATTACTGTGCGCAAAATCTGGTTAGGACGA |
| | GGATTAAGATGTGGATGTTTGACTACTGGGGTCAGGGAACCCTGGTCACCGTCTCGAGC |
| | (SEQ ID NO: 624) |
| ABT2-65-8 | GAGGTGCAGCTGTTGGAGTCTGGGGGAGGCTTGGTACAGCCTGGGGGGTCCCTGCGTCTCTC |
| | CTGTGCAGCCTCCGGATTCACCTTTGAGGATTATCAGATGGGGTGGGTCCGCCAGGCTCCAG |
| | GGAAGGGTCTAGAGTGGGTCTCATCGATTTCGGCTATGGGTAATCGGACATACTACGCAGAC |
| | TCCGTGAAGGGCCGGTTCACCATCTCCCGCGACGATTCCAAGAACACGCTGTATCTGCAAAT |
| | GAACAGCCTGCGTGCCGAGGACACCGCGGTTTATTACTGTGCGCAAAATCTGGTTCGTATGG |
| | ATAGTAGGCGTTGGATGTTTGACTACTGGGGTCAGGGAACCCTGGTCACCGTCTCGAGC |
| | (SEQ ID NO: 625) |
| ABT2-65-9 | GAGGTGCAGCTGTTGGAGTCTGGGGGAGGCTTGGTACATCCTGGGGGGTCCCTGCGTCTCTC |
| | CTGTGCAGCCTCCGGATTCACCTTTCGTTGGTATCCGATGGGTTGGGTCCGCCAGGCTCCAG |
| | GGAAGGGTCTAGAGTGGGTCTCATCGATTTCGGCTATGGGTAATCGGACATACTACGCAGAC |
| | TCCGTGAAGGGCCGGTTCACCATCTCCCGCGACGATTCCAAGAACACGCTGTATCTGCAAAT |
| | GAACAGCCTGCGTGCCGAGGACACCGCGGTATATTACTGTGCGGAAAATCTGGTTCGTACTC |
| | AGTCTAAGATGTGGATGTTTGACTACTGGGGTCAGGGAACCCTGGTCACCGTCTCGAGC |
| | (SEQ ID NO: 626) |
| ABT2-65- | AGGTGCAGCTGTCGGAGTCTGGGGGAGGCTTGGTACAGCCTGGGGGGTCCCTGCGTCTCTCC |
| 10 | TGTGCAGCCTCTGGATTCACCTTTACGGAGTATAATATGGGTTGGGTCCGCCAGGCTCCAGG |
| | GAAGGGTCTAGAGTGGGTCTCATCGATTTCGGCTATGGGTAATCGGACATACTACGCAGACT |
| | CCGTGAAGGGCCGGTTCACCATCTCCCGCGACGATTCCAAGAACACGCTGTATCTGCAAATG |
| | AACAGCCTGCGTGCCGAGGACACCGCGGTATATTACTGTGCGAATAATCTGGTTCGTACTCA |
| | GTCTAAGATGTGGATGTTTGACTACTGGGGTCAGGGAACCCTGGTCACCGTCTCGAGC |
| | (SEQ ID NO: 627) |
| ABT2-65- | GAGGTGCAGCTGTTGGAGTCTGGGGGAGGCTTGGTACAGCCTGGGGGGTCCCTGCGTCTCTC |
| 11 | CTGTGCAGCCTCCGGATTCACCTTTAGGGCGTATCCTATGGGTTGGGTCCGCCAGGCTCCAG |
| | GGAAGGGTCTAGAGTGGGTCTCATCGATTTCGGCTATGGGTAATCGGACATACTACGCAGAC |
| | TCCGTGAAGGGCCGGTTCACCATCTCCCGCGACGATTCCAAGAACACGCTGTATCTGCAAAT |
| | GAACAGCCTGCGTGCCGAGGACACCGCGGTATATTACTGTGCGAATAATCTGGTTCGTACTC |
| | AGTCTAAGATGTGGATGTTTGACTACTGGGGTCAGGGAACCCTGGTCACCGTCTCGAGC |
| | (SEQ ID NO: 628) |
| ABT2-65- | GAGGTGCAGCTGTTGGAGTCTGGGGGAGGCTTGGTACAGCCTGGGGGGTCCCTGCGTCTCTC |
| 12 | CTGTGCAGCCTCCGGATTCACCTTTCGGGAGTATTGGATGGGTTGGGTCCGCCAGGCTCCAG |
| | GGAAGGGTCTAGAGTGGGTCTCATCGATTTCGGCTATGGGTAATCGGACATACTACGCAGAC |
| | TCCGTGAAGGGCCGGTTCACCATCTCCCGCGACGATTCCAAGAACACGCTGTATCTGCAAAT |
| | GAACAGCCTGCGTGCCGAGGACACCGCGGTATATTACTGTGCGAACAATCTGGTTCGTACTC |
| | AGTCTAAGATGTGGATGTTTGACTACTGGGGTCAGGGAACCCTGGTCACCGTCTCGAGC |
| | (SEQ ID NO: 629) |
| ABT2-65- | GAGGTGCAGCTGTTGGAGTCTGGGGGAGGCTTGGTACAGCCTGGGGGGTCCCTGCGTCTCTC |
| 13 | CTGTGCAGCCTCCGGATTCACCTTTAGGGAGTATCAGATGGGTTGGGTCCGCCAGGCTCCAG |
| | GGAAGGGTCTAGAGTGGGTCTCATCGATTTCGGCTATGGGTAATCGGACATACTACGCAGAC |
| | TCCGTGAAGGGCCGGTTCACCATCTCCCGCGACGATTCCAAGAACACGCTGTATCTGCAAAT |
| | GAACAGCCTGCGTGCCGAGGACACCGCGGTATATTACTGTGCGAATAATCTGGTTCGTACTC |
| | AGTCTAAGATGTGGATGTTTGACTACTGGGGTCAGGGAACCCTGGTCACCGTCTCGAGC |
| | (SEQ ID NO: 630) |
| ABT2-65- | GAGGTGCAGCTGTTGGAGTCCGGGGGAGGCTTGGTACAGCCTGGGGGGTCCCTGCGTCTCTC |
| 14 | CTGTGCAGCCCCCGGATTCACCTTTCCGTATTATCCGATGGGTTGGGTCCGCCAGGCTCCAG |
| | GGAAGGGTCTAGAGTGGGTCTCATCGATTTCGGCTATGGGTAATCGGACATACTACGCAGAC |
| | TCCGTGAAGGGCCGGTTCACCATCTCCCGCGACGATTCCAAGAACACGCTGTATCTGCAAAT |
| | GAACAGCCTGCGTGCCGAGGACACCGCGGTATATTACTGTGCGAAAAATCTGGTTCGTACTC |
| | AGTCTAAGATGTGGATGTTTGACTACTGGGGTCAGGGAACCCTGGTCACCGTCTCGAGC |
| | (SEQ ID NO: 631) |
| ABT2-65- | GAGGTGCAGCTGTTGGAGTCTGGGGGAGGCTTGGTACAGCCTGGGGGGTCCCTGCGTCTCTC |
| 15 | CTGTGCAGCCTCCGGATTCACCTTTGGTATTTATCAGATGGGTTGGGTCCGCCAGGCTCCAG |
| | GGAAGGGTCTAGAGTGGGTCTCATCGATTTCGGCTATGGGTAATCGGACATACTACGCAGAC |
| | TCCGTGAAGGGCCGGTTCACCATCTCCCGCGACGATTCCAAGAACACGCTGTATCTGCAAAT |
| | GAACAGCCTGCGTGCCGAGGACACCGCGGTATATTACTGTGCGCAAAATCTGGTTCGTACTC |
| | AGTCTAAGATGTGGATGTTTGACTACTGGGGTCAGGGAACCCTGGTCACCGTCTCGAGC |
| | (SEQ ID NO: 632) |
| ABT2-65- | GAGGTGCAGCTGTTGGAGTCTGGGGGAGGCTTGGTACAGCCTGGGGGGTCCCTGCGTCTCTC |
| 16 | CTGTGCAGCCTCCGGATTCACCTTTGAGGATTATCAGATGGGGTGGGTCCGCCAGGCTCCAG |
| | GGAAGGGTCTAGAGTGGGTCTCATCGATTTCGGCTATGGGTAATCGGACATACTACGCAGAC |
| | TCCGTGAAGGGCCGGTTCACCATCTCCCGCGACGATTCCAAGAACACGCTGTATCTGCAAAT |
| | GAACAGCCTGCGTGCCGAGGACACCGCGGTATATTACTGTGCGGAAAATCTGGTTAAGTGGA |
| | GGAGTGCGGAGTGGATGTTTGACTACTGGGGTCAGGGAACCCTGGTCACCGTCTCGAGC |
| | (SEQ ID NO: 633) |
| ABT2-65- | GAGGTGCAGCTGTTGGAGTCTGGGGGAGGCTTGGTACAGCCTGGGGGGTCCCTGCGTCTCTC |
| 17 | CTGTGTAGCCTCCGGATTCACCTTTGAGGATTATCAGATGGGGTGGGTCCGCCAGGCTCCAG |
| | GGAAGGGTCTAGAGTGGGTCTCATCGATTTCGGCTATGGGTAATCGGACATACTACGCAGAC |
| | TCCGTGAAGGGCCGGTTCACCATCTCCCGCGACGATTCCAAGAACACGCTGTATCTGCAAAT |
| | GAACAGCCTGCGTGCCGAGGACACCGCGGTATATTACTGTGCGCAAAATCTGGTTAGGCTGG |
| | GGAGGTCTAGGTGGATGTTTGACTACTGGGGTCAGGGAACCCTGGTCACAGTCTCGAGC |
| | (SEQ ID NO: 634 |
| ABT2-65- | GAGGTGCAGCTGTTGGAGTCTGGGGGAGGCTTGGTACAGCCTGGGGGGTCCCTGCGTCTCTC |
| 18 | CTGTGCAGCCTCCGGATTCACCTTTGGGGATTATCAGATGGGGTGGGTCCGCCAGGCTCCAG |
| | GGAAGGGTCTAGAGTGGGTCTCATCGATTTCGGCTATGGGTAATCGGACATACTACGCAGAC |
| | TCCGTGAAGGGCCGGTTCACCATCTCCCGCGACGATTCCAAGAACACGCTGTATCTGCAAAT |
| | GAACAGCCTGCGTGCCGAGGACACCGCGGTATATTACTGTGCGGAAAATCTGGTTCAGTGGA |
| | GGATTGGTGCGTGGATGTTTGACTACTGGGGTCAGGGAACCCTGGTCACCGTCTCGAGC |
| | (SEQ ID NO: 635) |
| ABT2-65- | GAGGTGCAGCTGTTGGAGTCTGGGGGAGGCTTGGTACAGCCTGGGGGGTCCCTGCGTCTCTC |
| 19 | CTGTGCAGCCTCCGGATTCACCTTTGAGGATTATCAGATGGGGTGGGTCCGCCAGGCTCCAG |
| | GGAAGGGTCAAGAGTGGGTCTCATCGATTTCGGCTATGGGTAATCGGACATACTACGCAGAC |
| | TCCGTGAAGGGCCGGTTCACCATCTCCCGCGACGATTCCAAGAACACGCTGTATCTGCAAAT |
| | GAACAGCCTGCGTGCCGAGGACACCGCGGTATATTACTGTGCGAAAAATCTGGTTTTTTATG |
| | ATGCGATGAGGTGGATGTTTGACTACTGGGGTCAGGGAACCCTGGTCACCGTCTCGAGC |
| | (SEQ ID NO: 636) |
| ABT2-65- | GAGGCGCAGCTGTTGGAGTCTGGGGGAGGCTTGGTACAGCCTGGGGGGTCCCTGCGTCTCTC |
| 20 | CTGTGCAGCCTCCGGATTCACCTTTGAGGATTATCAGATGGGGTGGGTCCGCCAGGCTCCAG |
| | GGAAGGGTCTAGAGTGGGTCTCAGTTATTAGTCAGTTGGGTTGGAATACATACTACGCAGAC |
| | TCCGTGAAGGGCCGGTTCACCATCTCCCGCGACGATTCCAAGAACACGCTGTATCTGCAAAT |
| | GAACAGCCTGCGTGCCGAGGACACCGCGGTATATTACTGTGCGAAAAATCTGGTTCGTACTC |
| | AGTCTAAGATGTGGATGTTTGACTACTGGGGTCAGGGAACCCTGGTCACCGTCTCGAGC |
| | (SEQ ID NO: 637) |
| ABT2-65- | GAGGTGCAGCTGTTGGAGTCTGGGGGAGGCTTGGTACAGCCTGGGGGGTCCCTGCGTCTCTC |
| 21 | CTGTGCAGCCTCCGGATTCACCTTTGAGGATTATCAGATGGGGTGGGTCCGCCAGGCTCCAG |
| | GGAAGGGTCTAGAGTGGGTCTCAGCTATTTCGCAGCTGGGTTGGCATACATACTACGCAGAC |
| | TCCGTGAAGGGCCGGTTCACCATCTCCCGCGACGATTCCAAGAACACGCTGTATCTGCAAAT |
| | GAACAGCCTGCGTGCCGAGGACACCGCGGTATATTACTGTGCGAAAAATCTGGTTCGTACTC |
| | AGTCTAAGATGTGGATGTTTGACTACTGGGGTCAGGGAACCCTGGTCACCGTCTCGAGC |
| | (SEQ ID NO: 638) |
| ABT2-65- | GAGGTGCAGCTGTTGGAGTCTGGGGGAGGCTTGGTACAGCCTGGGGGGTCCCTGCGTCTCTC |
| 22 | CTGTGCAGCCTCCGGATTCACCTTTCTTGGGTATCCGATGGGTTGGGTCCGCCAGGCTCCAG |
| | GGAAGGGTCTAGAGTGGGTCTCATCGATTTCGGCTATGGGTAATCGGACATACTACGCAGAC |
| | TCCGTGAAGGGCCGGTTCACCATCTCTCCCGACGATTCCAAGAACACGCTGTATCTGCAAAT |
| | GAACAGCCTGCGTGCCGAGGACACCGCGGTATATTACTGTGCGAAAAATCTGGTTCGTACTC |
| | AGTCTAAGATGTGGATGTTTGACTACTGGGGTCAGGGAACCCTGGTCACCGTCTCGAGC |
| | (SEQ ID NO: 639) |
| ABT2-65- | GAGGTGCAGCTGTTGGAGTCTGGGGGAGGCTTGGTACAGCCTGGGGAGTCCCTGCGTCTCTC |
| 23 | CTGTGCAGCCTCCGGATTCACCTTTAAGGTGTATCCTATGGGTTGGGTCCGCCAGGCTCCAG |
| | GGAAGGGTCTAGAGTGGGTCTCATCGATTTCGGCTATGGGTAATCGGACATACTACGCAGAC |
| | TCCGTGAAGGGCCGGTTCACCATCTCCCGCGACGATTCCAAGAACACGCTGTATCTGCAAAT |
| | GAACAGCCTGCGTGCCGAGGACACCGCGGTATATTACTGTGCGAAAAATCTGGTTCGTACTC |
| | AGTCTAAGATGTGGATGTTTGACTACTGGGGTCAGGGAACCCTGGTCACCGTCTCGAGC |
| | (SEQ ID NO: 640) |
| ABT2-65- | GAGGTGCAGCTGTTGGAGTCTGGGGGAGGCTTGGTACAGCCTGGGGGGTCCCTGCGTCTCTC |
| 24 | CTGTGCAGCCTCCGGATTCACCTTTGCGGCTTATCAGATGGGGTGGGTCCGCCAGGCTCCAG |
| | GGAAGGGTCTAGAGTGGGTCTCATCGATTTCGGCTATGGGTAATCGGACATACTACGCAGAC |
| | TCCGTGAAGGGCCGGTTCACCATCTCCCGCGACGATTCCAAGAACACGCTGTATCTGCAAAT |
| | GAACAGCCTGCGTGCCGAGGACACCGCGGTATATTACTGTGCGCAAAATCTGGTTCGTACTC |
| | AGTCTAAGATGTGGATGTTTGACTACTGGGGTCAGGGAACCCTGGTCACCGTCTCGAGC |
| | (SEQ ID NO: 641) |
| ABT2-65- | GAGGTGCAGCTGTTGGAGTCTGGGGGAGGCTTGGTACAGCCTGGGGGGTCCCTGCGTCTCTC |
| 25 | CTGTGCAGCCTCCGGATTCACCTTTGAGGATTATCAGATGGGGTGGGTCCGCCAGGCTCCAG |
| | GGAAGGGTCTAGAGTGGGTCTCATCGATTTCGGCTATGGGTAATCGGACATACTACGCAGAC |
| | TCCGTGAAGGGCCGGTTCACCATCTCCCGCGACGATTCCAAGAACACGCTGTATCTGCAAAT |
| | GAACAGCCTGCGTGCCGAGGACACCGCGGTATATTACTGTGCGCAAAATCTGGTTCGTTATC |
| | GTAGTTATTATTGGATGTTTGACTACTGGGGTCAGGGAACCCTGGTCACCGTCTTGAGC |
| | (SEQ ID NO: 642) |
| ABT2-65- | GAGGTGCAGCTGTTGGAGTCTGGGGGAGGCTTGGTACAGCCTGGGGGGTCCCTGCGTCTCTC |
| 26 | CTGTGCAGCCTCCGGATTCACCTTTGAGGATTATCAGATGGGGTGGGTCCGCCAGGCTCCAG |
| | GGAAGGGTCTAGAGTGGGTCTCATCGATTTCGGCTATGGGTAATCGGACATACTACGCAGAC |
| | TCCGTGAAGGGCCGGTTCACCATCTCCCGCGACGATTCCAAGAACACGCTGTATCTGCAAAT |
| | GAACAGCCTGCGTGCCGAGGACACCGCGGTATATTACTGTGCGCAAAATCTGGTTCTGGTGC |
| | GTTCGGGTTATTGGATGTTTGACTACTGGGGTCAGGGAACCCTGGTCACCGTCTCGAGC |
| | (SEQ ID NO: 643) |
| ABT2-65- | GAGGTGCAGCTGTTGGAGTCTGGGGGAGGCTTGGTACAGCCTGGGGGGTCCCTGCGTCTCTC |
| 27 | CTGTGCAGCCTCCGGATTCACCTTTGAGGATTATCAGATGGGGTGGGTCCGCCAGGCTCCAG |
| | GGAAGGGTCTAGAGTGGGTCTCATCGATTTCGGCTATGGGTAATCGGACATACTACGCAGAC |
| | TCCGTGAAGGGCCGGTTCACCATCTCCCGCGACGATTCCAAGAACACGCTGTATCTGCAAAT |
| | GAACAGCCTGCGTGCCGAGGACACCGCGGTATATTACTGTGCGGAAAATCTGGTTCGTCTGT |
| | GGAAGGGTAGGTGGATGTTTGACTACTGGGGTCAGGGAACCCTGGTCACCGTCTCGAGC |
| | (SEQ ID NO: 644) |
| ABT2-65- | GAGGTGCAGCTGTTGGAGTCTGGGGGAGGCTTGGTACAGCCTGGGGGGTCCCTGCGTCTCTC |
| 28 | CTGTGCAGCCTCCGGATTCACCTTTGAGGATTATCAGATGGGGTGGGTCCGCCAGGCTCCAG |
| | GGAAGGGTCTAGAGTGGGTCTCATCGATTTCGGCTATGGGTAATCGGACATACTACGCAGAC |
| | TCCGTGAAGGGCCGGTTCACCATCTCCCGCGACGATTCCAAGAACACGCTGTATCTGCAAAT |
| | GAACAGCCTGCGTGCCGAGGACACCGCGGTATATTACTGTGCGCAAAATCTGGTTCAGTTTC |
| | GTCGTTCTCAGTGGATGTTTGATTACTGGGGTCAGGGAACCCTGGTCACCGTCTCGAGC |
| | (SEQ ID NO: 645) |
| ABT2-65- | GAGGTGCAGCTGTTGGAGTCTGGGGGAGGCTTGGTACAGCCTGGGGGGTCCCTGCGTCTCTC |
| 29 | CTGTGCAGCCTCCGGATTCACCTTTGAGGATTATCAGATGGGGTGGGTCCGCCAGGCTCCAG |
| | GGAAGGGTCTAGAGTGGGTCTCATCGATTTCGGCTATGGGTAATCGGACATACTACGCAGAC |
| | TCCGTGAAGGGCCGGTTCACCATCTCCCGCGACGATTCCAAGAACACGCTGTATCTGCAAAT |
| | GAACAGCCTGCGTGCCGAGGACACCGCGGTATATTACTGTGCGCAAAATCTGGTTTTGGTTC |
| | GGGTTGGGTGGTGGATGTTTGACTACTGGGGTCAGGGAACCCTGGTCACCGTCTCGAGC |
| | (SEQ ID NO: 646) |
| ABT2-65- | GAGGTGCGGCTGTTGGAGTCTGGGGGAGGCTTGGTACAGCCTGGGGGGTCCCTGCGTCTCTC |
| 30 | CTGTGCAGCCTCCGGATTCACCTTTGAGGATTATCAGATGGGGTGGGTCCGCCAGGCTCCAG |
| | GGAAGGGTCTAGAGTGGGTCTCATCGATTTCGGCTATGGGTAATCGGACATACTACGCAGAC |
| | TCCGTGAAGGGCCGGTTCACCATCTCCCGCGACGATTCCAAGAACACGCTGTATCTGCAAAT |
| | GAACAGCCTGCGTGCCGAGGACACCGCGGTATATTACTGTGCGCAAAATCTGGTTCGTCTGA |
| | ATAGGAGGGATTGGATGTTTGACTACTGGGGTCAGGGAACCCTGGTCACCGTCTCGAGC |
| | (SEQ ID NO: 647) |
| ABT2-65- | GAGGTGCAGCTGTTGGAGTCTGGGGGAGGCTTGGTACAGCCTGGGGGGTCCCTGCGTCTCTC |
| 31 | CTGTGCAGCCTCCGGATTCACCTTTGAGGATTATCAGATGGGGTGGGTCCGCCAGGCTCCAG |
| | GGAAGGGTCTAGAGTGGGTCTCATCGATTTCGGCTATGGGTAATCGGACATACTACGCAGAC |
| | TCCGTGAAGGGCCGGTTCACCATCTCCCGCGACGATTCCAAGAACACGCTGTATCTGCAAAT |
| | GAACAGCCTGCGTGCCGAGGACACCGCGGTATATTACTGTGCGCAAAATCTGGTTAAGATTA |
| | TGAGGTTGAAGTGGATGTTTGACTACTGGGGTCAGGGAACCCTGGTCACCGTCTCGAGC |
| | (SEQ ID NO: 648) |
| ABT2-65- | GAGGTGCAGCTGTTGGAGTCTGGGGGAGGCTTGGTACAGCCTGGGGGGTCCCTGCGTCTCTC |
| 32 | CTGTGCAGCCTCCGGATTCACCTTTGAGGATTATCAGATGGGGTGGGTCCGCCAGGCTCCAG |
| | GGAAGGGTCTAGAGTGGGTCTCATCGATTTCGGCTATGGGTAATCGGACATACTACGCAGAC |
| | TCCGTGAAGGGCCGGTTCACCATCTCCCGCGACGATTCCAAGAACACGCTGTATCTGCAAAT |
| | GAACAGCCTGCGTGCCGAGGACACCGCGGTATATTACTGTGCGCAAAATCTGGTTGCGGTGT |
| | CGCGGGGTCGGTGGATGTTTGACTACTGGGGTCAGGGAACCCTGGTCACCGTCTCGAGC |
| | (SEQ ID NO: 649) |
| ABT2-65- | GAGGTGCAGCTGTTGGAGTCTGGGGGAGGCTTGGTACAGCCTGGGGGGTCCCTGCGTCTCTC |
| 33 | CTGTGCAGCCTCCGGATTCACCTTTGAGGATTATCAGATGGGGTGGGTCCGCCAGGCTCCAG |
| | GGAAGGGTCTAGAGTGGGTCTCATCGATTTCGGCTATGGGTAATCGGACATACTACGCAGAC |
| | TCCGTGAAGGGCCGGTTCACCATCTCCCGCGACGATTCCAAGAACACGCTGTATCTGCAAAT |
| | GAACAGCCTGCGTGCCGAGGACACCGCGGTATATTACTGTGCGCAAAATCTGGTTAGGTATA |
| | TGAAGTCTCAGTGGATGTTTGACTACTGGGGTCAGGGAACCCTGGTCACCGTCTCGAGC |
| | (SEQ ID NO: 650) |
| ABT2-65- | GAGGTGCAGCTGTTGGAGTCTGGGGGAGGCTTGGTACAGCCTGGGGGGTCCCTGCGTCTCTC |
| 34 | CTGTGCAGCCTCCGGATTCACCTTTGAGGATTATCAGATGGGGTGGGTCCGCCAGGCTCCAG |
| | GGAAGGGTCTAGAGTGGGTCTCATCGATTTCGGCTATGGGTAATCGGACATACTACGCAGAC |
| | TCCGTGAAGGGCCGGTTCACCATCTCCCGCGACGATTCCAAGAACACGCTGTATCTGCAAAT |
| | GAACAGCCTGCGTGCCGAGGACACCGCGGTATATTACTGTGCGCAAAATCTGGTTCGTACTA |
| | GGTCTAAGAGGTGGATGTTTGACTACTGGGGTCAGGGAACCCTGGTCACCGTCTCGAGC |
| | (SEQ ID NO: 651) |
| ABT2-65- | GAGGTGCAGCTGTTGGAGTCTGGGGGAGGCTTGGTACAGCCTGGGGGGTCCCTGCGTCTCTC |
| 35 | CTGTGTAGCCTCCGGATTCACCTTTGAGGATTATCAGATGGGGTGGGTCCGCCAGGCTCCAG |
| | GGAAGGGTCTAGAGTGGGTCTCATCGATTTCGGCTATGGGTAATCGGACATACTACGCAGAC |
| | TCCGTGAAGGGCCGGTTCACCATCTCCCGCGACGATTCCAAGAACACGCTGTATCTGCAAAT |
| | GAACAGCCTGCGTGCCGAGGACACCGCGGTATATTACTGTGCGCAAAATCTGGTTAGGCTGA |
| | GGAGGTCTAGGTGGATGTTTGACTACTGGGGTCAGGGAACCCTGGTCACAGTCTCGAGC |
| | (SEQ ID NO: 652) |
| ABT2-65- | GAGGTGCGGCTGTTGGAGTCTGGGGGAGGCTTGGTACAGCCTGGGGGGTCCCTGCGTCTCTC |
| 36 | CTGTGCAGCCTCCGGATTCACCTTTGAGGATTATCAGATGGGGTGGGTCCGCCAGGCTCCAG |
| | GGAAGGGTCTAGAGTGGGTCTCATCGATTTCGGCTATGGGTAATCGGACATACTACGCAGAC |
| | TCCGTGAAGGGCCGGTTCACCATCTCCCGCGACGATTCCAAGAACACGCTGTATCTGCAAAT |
| | GAACAGCCTGCGTGCCGAGGACACCGCGGTATATTACTGTGCGCAAAATCTGGTTCGTACTC |
| | AGTCTAAGATGTGGATGTTTGACTACTGGGGTCAGGGAACCCTGGTCACCGTCTCGAGC |
| | (SEQ ID NO: 653) |
| ABT2-65- | GAGGTGCAGCTGTTGGAGTCTGGGGGAGGCTTAGTACAGCCTGGGGGGTCCCTGCGTCTCTC |
| 37 | CTGTGCAGCCTCCGGATTCACCTTTGCGGATTATCAGATGGGGTGGGTCCGCCAGGCTCCAG |
| | GGAAGGGTCTAGAGTGGGTCTCATCGATTTCGGCTATGGGTAATCGGACATACTACGCAGAC |
| | TCCGTGAAGGGCCGGTTCACCATCTCCCGCGACGATTCCAAGAACACGCTGTATCTGCAAAT |
| | GAACAGCCTGCGTGCCGAGGACACCGCGGTATATTACTGTGCGCAAAATCTGGTTCGTACTC |
| | AGTCTAAGATGTGGATGTTTGACTACTGGGGTCAGGGAACCCTGGTCACCGTCTCGAGC |
| | (SEQ ID NO: 654) |
| ABT2-65- | GAGGTGCAGCTGTTGGAGTCTGGGGGAGGCTTGGTACAGCCTGGGGGGTCCCTGCGTCTCTC |
| 38 | CTGTGCAGCCTCCGGATTCACCTTTGAGGATTATCAGATGGGGTGGGTCCGCCAGGCTCCAG |
| | GGAAGGGTCTAGAGTGGGTCTCATCGATTTCGGCTATGGGTAATCGGACATACTACGCAGAC |
| | TCCGTGAAGGGCCGGTTCACCATCTACCGCGACGATTCCAAGAACACGCTGTATCTGCAAAT |
| | GAACAGCCTGCGTGCCGAGGACACCGCGGTATATTACTGTGCGCAAAATCTGGTTCGTACTC |
| | AGTCTAAGATGTGGATGTTTGACTACTGGGGTCAGGGAACCCTGGTCACCGTCTCGAGC |
| | (SEQ ID NO: 655) |
| ABT2-65- | GAGGTGCAGCTGTTGGAGTCTGGGGGAGGCTTGGTACAGCCTGGGGGGTCCCTGCGTCTCTC |
| 39 | CTGTGCAGCCTCCGGATTCACCTTTGAGGATTATCAGATGGGGTGGGTCCGCCAGGCTCCAG |
| | GGAAGGGTCTAGAGTGGGTCTCATCGATTTCGGCTATGGGTAATCGGACATACTACGCAGAC |
| | TCCGTGAAGGGCCGGTTCACCATCTCCCGCGACGATTCCAAGAACACGCTGTATCTGCAAAT |
| | GAACAGCCTGCGTGCCGAGGACACCGCGGTATATTACTGTGCGGGAAATCTGGTTCGTACTC |
| | AGTCTAAGATGTGGATGTTTGACTACTGGGGTCAGGGAACCCTGGTCACCGTCTCGAGC |
| | (SEQ ID NO: 656) |
| ABT2-65- | GAGGTGCAGCTGTTGGAGTCTGGGGGAGGCTTGGTACAGCCTGGGGGGTCCCTGCGTCTCTC |
| 40 | CTGTGCAGCCTCCGGATTCACCTTTGAGGATTATCAGATGGGGTGGGTCCGCCAGGCTCCAG |
| | GGAAGGGTCTAGAGTGGGTCTCATCGATTTCGGCTATGGGTAATCGGACATACTACGCAGAC |
| | TCCGTGAAGGGCCGGTTCACCATCTCCCGCGACGATTCCAAGAACACGCTGTATCTGCAAAT |
| | GAACAGCCTGCGTGCCGAGGACACCGCGGTATATTACTGTGCGCAAAATCTGGTTAAGACGT |
| | TTAAGAGTAGGTGGATGTTTGACTACTGGGGTCAGGGAACCCTGGTCACCGTCTCGAGC |
| | (SEQ ID NO: 657) |
| ABT2-65- | GAGGTGCAGCTGTTGGAGTCTGGGGGAGGCTTGGTACAGCCTGGGGGGTCCCTGCGTCTCTC |
| 41 | CTGTGCAGCCTCCGGATTCACCTTTGAGGATTATCAGATGGGGTGGGTCCGCCAGGCTCCAG |
| | GGAAGGGTCTAGAGTGGGTCTCATCGATTTCGGCTATGGGTAATCGGACATACTACGCAGAC |
| | TCCGTGAAGGGCCGGTTCACCATCTCCCGCGACGATTCCAAGAACACGCTGTATCTGCAAAT |
| | GAACAGCCTGCGTGCCGAGGACACCGCGGTATATTACTGTGCGAAATGGGTGACTCGTACTC |
| | AGTCTAAGCTGGGGCTGTTTGACTACTGGGGTCAGGGAACCCTGGTCACCGTCTCGAGC |
| | (SEQ ID NO: 658) |
| ABT2-65- | GAGGTGCAGCTGTTGGAGTCTGGGGGAGGCTTGGTACAGCCTGGGGGGTCCCTGCGTCTCTC |
| 42 | CTGTGCAGCCTCCGGATTCACCTTTGAGGATTATCAGATGGGGTGGGTCCGCCAGGCTCCAG |
| | GGAAGGGTCTAGAGTGGGTCTCATCGATTTCGGCTATGGGTAATCGGACATACTACGCAGAC |
| | TCCGTGAAGGGCCGGTTCACCATCTCCCGCGACGATTCCAAGAACACGCTGTATCTGCAAAT |
| | GAACAGCCTGCGTGCCGAGGACACCGCGGTATATTACTGTGCGAAATGGGTGACTCGTACTC |
| | AGTCTAAGTTGGGTCGGTTTGACTACTGGGGTCAGGGAACCCTGGTCACCGTCTCGAGC |
| | (SEQ ID NO: 659) |
| ABT2-65- | GAGGTGCAGCTGTTGGAGTCTGGGGGAGGCTTGGTACAGCCTGGGGGGTCCCTGCGTCTCTC |
| 43 | CTGTGCAGCCTCCGGATTCACCTTTGAGGATTATCAGATGGGGTGGGTCCGCCAGGCTCCAG |
| | GGAAGGGTCTAGAGTGGGTCTCATCGATTTCGGCTATGGGTAATCGGACATACTACGCAGAC |
| | TCCGTGAAGGGCCGGTTCACCATCTCCCGCGACGATTCCAAGAACACGCTGTATCTGCAAAT |
| | GAACAGCCTGCGTGCCGAGGACACCGCGGTATATTACTGTGCGAAATGGAGGTATCGTATTC |
| | AGTCTAAGCTGGGGCTGTTTGACTACTGGGGTCAGGGAACCCTGGTCACCGTCTCGAGC |
| | (SEQ ID NO: 660) |
| ABT2-65- | GAGGTGCAGCTGTTGGAGTCTGGGGGAGGCTTGGTACAGCCTGGGGGGTCCCTGCGTCTCTC |
| 44 | CTGTGCAGCCTCCGGATTCACCTTTGAGGATTATCAGATGGGGTGGGTCCGCCAGGCTCCAG |
| | GGAAGGGTCTAGAGTGGGTCTCATCGATTTCGGCTATGGGTAATCGGACATACTACGCAGAC |
| | TCCGTGAAGGGCCGGTTCACCATCTCCCGCGACGATTCCAAGAACACGCTGTATCTGCAAAT |
| | GAACAGCCTGCGTGCCGAGGACACCGCGGTATATTACTGTGCGAAATGGTTGGGTCGTATTC |
| | AGTCTAAGTTGGGTCTGTTTGACTACTGGGGTCAGGGAACCCTGGTCACCGTCTCGAGC |
| | (SEQ ID NO: 661) |
| ABT2-65- | GAGGTGCAGCTGTTGGAGTCTGGGGGAGGCTTGGTACAGCCTGGGGGGTCCCTGCGTCTCTC |
| 45 | CTGTGCAGCCTCCGGATTCACCTTTGAGGATTATCAGATGGGGTGGGTCCGCCAGGCTCCAG |
| | GGAAGGGTCTAGAGTGGGTCTCATCGATTTCGGCTATGGGTAATCGGACATACTACGCAGAC |
| | TCCGTGAAGGGCCGGTTCACCATCTCCCGCGACGATTCCAAGAACACGCTGTATCTGCAAAT |
| | GAACAGCCTGCGTGCCGAGGACACCGCGGTATATTACTGTGCGAAATGGCGTCGGCGTACTC |
| | AGTCTAAGCTGGGGTATTTTGACTACTGGGGTCAGGGAACCCTGGTCACCGTCTCGAGC |
| | (SEQ ID NO: 662) |
| ABT2-65- | GAGGTGCAGCTGTTGGAGTCTGGGGGAGGCTTGGTACAGCCTGGGGGGTCCCTGCGTCTCTC |
| 46 | CTGTGCAGCCTCCGGATTCACCTTTGAGGATTATCAGATGGGGTGGGTCCGCCAGGCTCCAG |
| | GGAAGGGTTTAGAGTGGGTCTCATCGATTTCGGCTATGGGTAATCGGACATACTACGCAGAC |
| | TCCGTGAAGGGCCGGTTCACCATCTCCCGCGACGATTCCAAGAACACGCTGTATCTGCAAAT |
| | GAACAGCCTGCGTGCCGAGGACACCGCGGTATATTACTGTGCGAAATGGTTGACGCGTACTC |
| | AGTCTAAGTTGGGGTATTTTGACTACTGGGGTCAAGGAACCCTGGTCACCGTCTCGAGC |
| | (SEQ ID NO: 663) |
| ABT2-65- | GAGGTGCAGCTGTTGGAGTCTGGGGGAGGCTTGGTACAGCCTGGGGGGTCCCTGCGTCTCTC |
| 47 | CTGTGCAGCCTCCGGATTCACCTTTGAGGATTATCAGATGGGGTGGGTCCGCCAGGCTCCAG |
| | GGAAGGGTCTAGAGTGGGTCTCATCGATTTCGGCTATGGGTAATCGGACATACTACGCAGAC |
| | TCCGTGAAGGGCCGGTTCACCATCTCCCGCGACGATTCCAAGAACACGCTGTATCTGCAAAT |
| | GAACAGCCTGCGTGCCGAGGACACCGCGGTATATTACTGTGCGAAATGGAGGAAGCGTACTC |
| | AGTCTAAGCTTGGTTATTTTGACTACTGGGGTCAGGGAACCCTGGTCACCGTCTCGAGC |
| | (SEQ ID NO: 664) |
| ABT2-65- | GAGGTGCAGCTGTTGGAGTCTGGGGGAGGCTTGGTACAGCCTGGGGGGTCCCTGCGTCTCTC |
| 48 | CTGTGCAGCCTCCGGATTCACCTTTGAGGATTATCAGATGGGGTGGGTCCGCCAGGCTCCAG |
| | GGAAGGGTCTAGAGTGGGTCTCATCGATTTCGGCTATGGGTAATCGGACATACTACGCAGAC |
| | TCCGTGAAGGGCCGGTTCACCATCTCCCGCGACGATTCCAAGAACACGCTGTATCTGCAAAT |
| | GAACAGCCTGCGTGCCGAGGACACCGCGGTATATTACTGTGCGAAATGGCAGATGCGTACTC |
| | AGTCTAAGCTTGGTTATTTTGACTACTGGGGTCAGGGAACCCTGGTCACCGTCTCGAGC |
| | (SEQ ID NO: 665) |
| ABT2-65- | GGGGTGCAGCTGTTGGAGTCTGGGGGAGGCTTGGTACAGCCTGGGGGGTCCCTGCGTCTCTC |
| 49 | CTGTGCAGCCTCCGGATTCACCTTTGAGGATTATCAGATGGGGTGGGTCCGCCAGGCTCCAG |
| | GGAAGGGTCTAGAGTGGGTCTCATCGATTTCGGCTATGGGTAATCGGACATACTACGCAGAC |
| | TCCGTGAAGGGCCGGTTCACCATCTCCCGCGACGATTCCAAGAACACGCTGTATCTGCAAAT |
| | GAACAGCCTGCGTGCCGAGGACACCGCGGTATATTACTGTGCGCAAAATCTGGTTCGTACTC |
| | AGTCTAAGATGTGGATGTTTGACTACTGGGGTCAGGGAACCCTGGTCACCGTCTCGAGC |
| | (SEQ ID NO: 666) |
| ABT2-65- | GAGGTGCAGCTGTTGGAGTCTGGGGGAGGCTTGGTACAGCCTGGGGGGTCCCTGCGTCTCTC |
| 50 | CTGTGCAGCCTCCGGATTCACCTTTCTGACGTATCCGATGGGGTGGGTCCGCCAGGCTCCAG |
| | GGAAGGGTCTAGAGTGGGTCTCATCGATTTCGGCTATGGGTAATCGGACATACTACGCAGAC |
| | TCCGTGAAGGGCCGGTTCACCATCTCCCGCGACGATTCCAAGAACACGCTGTATCTGCAAAT |
| | GAACAGCCTGCGTGCCGAGGACACCGCGGTATATTACTGTGCGAAAAATCTGGTTCGTACTC |
| | AGTCTAAGATGTGGATGTTTGACTACTGGGGTCGGGGAACCCTGGTCACCGTCTCGAGC |
| | (SEQ ID NO: 667) |
| ABT2-65- | GAGGTGCAGGTGTTGGAGTCTGGGGGAGGCTTGGTACAGCCTGGGGGGTCCCTGCGTCTCTC |
| 52 | CTGTGCAGCCTCCGGATTCACCTTTTATAGTTATCCTATGGGTTGGGTCCGCCAGGCTCCAG |
| | GGAAGGGTCTAGAGTGGGTCTCATCGATTTCGGCTATGGGTAATCGGACATACTACGCAGAC |
| | TCCGTGAAGGGCCGGTTCACCATCTCCCGCGACGATTCCAAGAACACGCTGTATCTGCAAAT |
| | GAACAGCCTGCGTGCCGAGGACACCGCGGTATATTACTGTGCGAAAAATCTGGTTCGTACTC |
| | AGTCTAAGATGTGGATGTTTGACTACTGGGGTCAGGGAACCCTGGTCACCGTCTCGAGC |
| | (SEQ ID NO: 668) |
| ABT2-65- | GAGGTGCAGCTGTTGGAGTCTGGGGGAGGCTTGGTACAGCCTGGGGGGTCCCTGCGTCTCTC |
| 53 | CTGTGCAGCCTCCGGATTCACCTTTTATGTTTATCCTATGGGTTGGGTCCGCCAGGCTCCAG |
| | GGAAGGGTCTAGAGTGGGTCTCATCGATTTCGGCTATGGGTAATCGGACATACTACGCAGAC |
| | TCCGTGAAGGGCCGGTTCACCATCTCCCGCGACGATTCCAAGAACACGCTGTATCTGCAAAT |
| | GAACAGCCTGCGTGCTGAGGACACCGCGGTATATTACTGTGCGATAAATCTGGTTCGTACTC |
| | AGTCTAAGATGTGGATGTTTGACTACTGGGGTCAGGGAACCCTGGTCACCGTCTCGAGC |
| | (SEQ ID NO: 669) |
| ABT2-65- | GAGGTGCAGCTGTTGGAGTCTGGGGGAGGCTTGGTACAGCCTGGGGGGTCCCTGCGTCTCTC |
| 54 | CTGTGCAGCCTCCGGATTCACCTTTGAGGATTATCAGATGGGGTGGGTCCGCCAGGCTCCAG |
| | GGAAGGGTCTAGAGTGGGTCTCAACTATTAGTCAGTTGGGTTGGATGACATACTACGCAGAC |
| | TCCGTGAAGGGCCGGTTCACCATCTCCCGCGACGATTCCAAGAACACGCTGTATCTGCAAAT |
| | GAACAGCCTGCGTGCCGAGGACACCGCGGTATATTACTGTGCGAAAAATCTGGTTCGTACTC |
| | AGTCTAAGATGTGGATGTTTGACTACTGGGGTCAGGGAACCCTGGTCACCGTCTCGAGC |
| | (SEQ ID NO: 670) |
| ABT2-65- | GAGGTGCAGCTGTTGGAGTCTGGGGGAGGCTTGGCACAGCCTGGGGGGTCCCTGCGTCTCTC |
| 55 | CTGTGCAGCCTCCGGATTCACCTTTGAGGATTATCAGATGGGGTGGGTCCGCCAGGCTCCAG |
| | GGAAGGGTCTAGAGTGGGTCTCAGCGATTACTCAGCTTGGTTGGTATACATACTACGCAGAC |
| | TCCGTGAAGGGCCGGTTCACCATCTCCCGCGACGATTCCAAGAACACGCTGTATCTGCAAAT |
| | GAACAGCCTGCGTGCCGAGGACACCGCGGTATATTACTGTGCGAAAAATCTGGTTCGTACTC |
| | AGTCTAAGATGTGGATGTATGACTACTGGGGTCAGGGAACCCTGGTCACCGTCTCGAGC |
| | (SEQ ID NO: 671) |
| ABT2-65- | GAGGTGCAGTTGTTGGAGTCTGGGGGAGGCTTGGTACAGCCTGGGGGGTCCCTGCGTCTCTC |
| 56 | CTGTGCAGCCTCCGGATTCACCTTTCCTGAGTATTATATGGGGTGGGTCCGCCAGGCTCCAG |
| | GGAAGGGTCTAGAGTGGGTCTCATCGATTTCGGCTATGGGTAATCGGACATACTACGCAGAC |
| | TCCGTGAAGGGCCGGTTCACCATCTCCCGCGACGATTCCAAGAACACGCTGTATCTGCAAAT |
| | GAACAGCCTGCGTGCCGAGGACACCGCGGTATATTACTGTGCGCAAAATCTGGTTAGGCTGG |
| | GGAGGTCTAGGTGGATGTTTGACTACTGGGGTCAGGGAACCCTGGTCACAGTCTCGAGC |
| | (SEQ ID NO: 672) |
| ABT2-65- | GAGGTGCAGCTGTTGGAGTCTGGGGGAGGCTTGGTACAGCCTGGGGGGTCCCTGCGTCTCTC |
| 57 | CTGTGCAGCCTCCGGATTCACCTTTAGGGAGTATGGTATGGGGTGGGTCCGCCAGGCTCCAG |
| | GGAAGGGTCTAGAGTGGGTCTCATCGATTTCGGCTATGGGTAATCGGACATACTACGCAGAC |
| | TCCGTGAAGGGCCGGTTCACCATCTCCCGCGACGATTCCAAGAACACGCTGTATCTGCAAAT |
| | GAACAGCCTGCGTGCCGAGGACACCGCGGTATATTACTGTGCGCAAAATCTGGTTAGGCTGG |
| | GGAGGTCTAGGTGGATGTTTGACTACTGGGGTCAGGGAACCCTGGTCACAGTCTCGAGC |
| | (SEQ ID NO: 673) |
| ABT2-65- | GAGGTGCAGCTGTTGGAGTCTGGGGGAGGCTTGGTACAGCCTGGGGGGTCCCTGCGTCTCTC |
| 58 | CTGTGCAGCCTCCGGATTCACCTTTGTTATTTATCCGATGGGGTGGGTCCGCCAGGCTCCAG |
| | GGAAGGGTCTAGAGTGGGTCTCATCGATTTCGGCTATGGGTAATCGGACATACTACGCAGAC |
| | TCCGTGAAGGGCCGGTTCACCATCTCCCGCGACGATTCCAAGAACACGCTGTATCTGCAAAT |
| | GAACAGCCTGCGTGCCGAGGACACCGCGGTATATTACTGTGCGCAAAATCTGGTTAGGCTGG |
| | GGAGGTCTAGGTGGATGTTTGACTACTGGGGTCAGGGAACCCTGGTCACAGTCTCGAGC |
| | (SEQ ID NO: 674) |
| ABT2-65- | GAGGTGCAGCTGTTGGAGTCTGGGGGAGGCTTGGTACAGCCTGGGGGGTCCCTGCGTCTCTC |
| 59 | CTGTGCAGCCTCCGGATTCACCTTTGATACTTATTGGATGGGGTGGGTCCGCCAGGCTCCAG |
| | GGAAGGGTCTAGAGTGGGTCTCATCGATTTCGGCTATGGGTAATCGGACATACTACGCAGAC |
| | TCCGTGAAGGGCCGGTTCACCATCTCCCGCGACGATTCCAAGAACACGCTGTATCTGCAAAT |
| | GAACAGCCTGCGTGCCGAGGACACCGCGGTATATTACTGTGCGCAAAATCTGGTTAGGCTGG |
| | GGAGGTCTAGGTGGATGTTTGACTACTGGGGTCAGGGAACCCTGGTCACAGTCTCGAGC |
| | (SEQ ID NO: 675) |
| ABT2-65- | GAGGTGCAGCTGTTGGAGTCTGGGGGAGGCTTGGTACAGCCTGGGGGGTCCCTGCGTCTCTC |
| 60 | CTGTGCAGCCTCCGGATTCACCTTTAGTATGTATCAGATGGGGTGGGTCCGCCAGGCTCCAG |
| | GGAAGGGTCTAGAGTGGGTCTCATCGATTTCGGCTATGGGTAATCGGACATACTACGCAGAC |
| | TCCGTGAAGGGCCGGTTCACCATCTCCCGCGACGATTCCAAGAACACGCTGTATCTGCAAAT |
| | GAACAGCCTGCGTGCCGAGGACACCGCGGTATATTACTGTGCGCAAAATCTGGTTAGGCTGG |
| | GGAGGTCTAGGTGGATGTTTGACTACTGGGGTCAGGGAACCCTGGTCACAGTCTCGAGC |
| | (SEQ ID NO: 676) |
| ABT2-65- | GAGGTGCAGCTGTTGGAGTCTGGGGGAGGCTTGGTACAGCCTGGGGGGTCCCTGCGTCTCTC |
| 61 | CTGTGCAGCCTCCGGATTCACCTTTAGGGAGTATCAGATGGGGTGGGTCCGCCAGGCTCCAG |
| | GGAAGGGTCTAGAGTGGGTCTCATCGATTTCGGCTATGGGTAATCGGACATACTACGCAGAC |
| | TCCGTGAAGGGCCGGTTCACCATCTCCCGCGACGATTCCAAGAACACGCTGTATCTGCAAAT |
| | GAACAGCCTGCGTGCCGAGGACACCGCGGTATATTACTGTGCGCAAAATCTGGTTAGGCTGG |
| | GGAGGTCTAGGTGGATGTTTGACTACTGGGGTCAGGGAACCCTGGTCACAGTCTCGAGC |
| | (SEQ ID NO: 677) |
| ABT2-65- | GAGGTGCAGCTGTTGGAGTCTGGGGGAGGCTTGGTACAGCCTGGGGGGTCCCTGCGTCTCTC |
| 62 | CTGTGCAGCCTCCGGATTCACCTTTCGGGAGTATTTTATGGGGTGGGTCCGCCAGGCTCCAG |
| | GGAAGGGTCTAGAGTGGGTCTCATCGATTTCGGCTATGGGTAATCGGACATACTACGCAGAC |
| | TCCGTGAAGGGCCGGTTCACCATCTCCCGCGACGATTCCAAGAACACGCTGTATCTGCAAAT |
| | GAACAGCCTGCGTGCCGAGGACACCGCGGTATATTACTGTGCGCAAAATCTGGTTAGGCTGG |
| | GGAGGTCTAGGTGGATGTTTGACTACTGGGGTCAGGGAACCCTGGTCACAGTCTCGAGC |
| | (SEQ ID NO: 678) |
| ABT2-65- | GAGGTGCAGCTGTTGGAGTCTGGGGGAGGCTTGGTACAGCCTGGGGGGTCCCTGCGTCTCTC |
| 63 | CTGTGCAGCCTCCGGATTCACCTTTGATGGTTATAATATGGGGTGGGTCCGCCAGGCTCCAG |
| | GGAAGGGTCTAGAGTGGGTCTCATCGATTTCGGCTATGGGTAATCGGACATACTACGCAGAC |
| | TCCGTGAAGGGCCGGTTCACCATCTCCCGCGACGATTCCAAGAACACGCTGTATCTGCAAAT |
| | GAACAGCCTGCGTGCCGAGGACACCGCGGTATATTACTGTGCGCAAAATCTGGTTAGGCTGG |
| | GGAGGTCTAGGTGGATGTTTGACTACTGGGGTCAGGGAACCCTGGTCACAGTCTCGAGC (SEQ |
| | ID NO: 679) |
| ABT2-65- | GAGGTGCAGCTGTTGGAGTCTGGGGGAGGCTTGGTACAGCCTGGGGGGTCCCTGCGTCTCTC |
| 64 | CTGTGTAGCCTCCGGATTCACCTTTGAGGATTATCAGATGGGGTGGGTCCGCCAGGCTCCAG |
| | GGAAGGGTCTAGAGTGGGTCTCAAGTATTAGGACTCCTGGTAAGTTTACATACTACGCAGAC |
| | TCCGTGAAGGGCCGGTTCACCATCTCCCGCGACGATTCCAAGAACACGCTGTATCTGCAAAT |
| | GAACAGCCTGCGTGCCGAGGACACCGCGGTATATTACTGTGCGCAAAATCTGGTTAGGCTGG |
| | GGAGGTCTAGGTGGATGTTTGACTACTGGGGTCAGGGAACCCTGGTCACAGTCTCGAGC |
| | (SEQ ID NO: 680) |
| ABT2-65- | GAGGTGCAGCTGTTGGAGTCTGGGGGAGGCTTGGTACAGCCTGGGGGGTCCCTGCGTCTCTC |
| 65 | CTGTGTAGCCTCCGGATTCACCTTTGAGGATTATCAGATGGGGTGGGTCCGCCAGGCTCCAG |
| | GGAAGGGTCTAGAGTGGGTCTCATCTATTAGTGTGGCTGGTAAGCCTACATACTACGCAGAC |
| | TCCGTGAAGGGCCGGTTCACCATCTCCCGCGACGATTCCAAGAACACGCTGTATCTGCAAAT |
| | GAACAGCCTGCGTGCCGAGGACACCGCGGTATATTACTGTGCGCAAAATCTGGTTAGGCTGG |
| | GGAGGTCTAGGTGGATGTTTGACTACTGGGGTCAGGGAACCCTGGTCACAGTCTCGAGC |
| | (SEQ ID NO: 681) |
| ABT2-65- | GAGGTGCAGCTGTTGGAGTCTGGGGGAGGCTTGGTACAGCCTGGGGGGTCCCTGCGTCTCTC |
| 66 | CTGTGTAGCCTCCGGATTCACCTTTGAGGATTATCAGATGGGGTGGGTCCGCCAGGCTCCAG |
| | GGAAGGGTCTAGAGTGGGTCTCAACTATTGCGCTGCTGGGTGGGCCTACATACTACGCAGAC |
| | TCCGTGAAGGGCCGGTTCACCATCTCCCGCGACGATTCCAAGAACACGCTGTATCTGCAAAT |
| | GAACAGCCTGCGTGCCGAGGACACCGCGGTATATTACTGTGCGCAAAATCTGGTTAGGCTGG |
| | GGAGGTCTAGGTGGATGTTTGACTACTGGGGTCAGGGAACCCTGGTCACAGTCTCGAGC |
| | (SEQ ID NO: 682) |
| ABT2-65- | GAGGTGCAGCTGTTGGAGTCTGGGGGAGGCTTGGTACAGCCTGGGGGGTCCCTGCGTCTCTC |
| 67 | CTGTGTAGCCTCCGGATTCACCTTTGAGGATTATCAGATGGGGTGGGTCCGCCAGGCTCCAG |
| | GGAAGGGTCTAGAGTGGGTCTCAACGATTCAGGTTTTTGGTGGTAAGACATACTACGCAGAC |
| | TCCGTGAAGGGCCGGTTCACCATCTCCCGCGACGATTCCAAGAACACGCTGTATCTGCAAAT |
| | GAACAGCCTGCGTGCCGAGGACACCGCGGTATATTACTGTGCGCAAAATCTGGTTAGGCTGG |
| | GGAGGTCTAGGTGGATGTTTGACTACTGGGGTCAGGGAACCCTGGTCACAGTCTCGAGC |
| | (SEQ ID NO: 683) |
| ABT2-65- | GAGGTGCAGCTGTTGGAGTCTGGGGGAGGCTTGGTACAGCCTGGGGGGTCCCTGCGTCTCTC |
| 68 | CTGTGTAGCCTCCGGATTCACCTTTGAGGATTATCAGATGGGGTGGGTCCGCCAGGCTCCAG |
| | GGAAGGGTCTAGAGTGGGTCTCAAGTATTCGGCCGACTGGTCCGTTTACATACTACGCAGAC |
| | TCCGTGAAGGGCCGGTTCACCATCTCCCGCGACGATTCCAAGAACACGCTGTATCTGCAAAT |
| | GAACAGCCTGCGTGCCGAGGACACCGCGGTATATTACTGTGCGCAAAATCTGGTTAGGCTGG |
| | GGAGGTCTAGGTGGATGTTTGACTACTGGGGTCAGGGAACCCTGGTCACAGTCTCGAGC |
| | (SEQ ID NO: 684) |
| ABT2-65- | GAGGTGCAGCTGTTGGAGTCTGGGGGAGGCTTGGTACAGCCTGGGGGGTCCCTGCGTCTCTC |
| 69 | CTGTGTAGCCTCCGGATTCACCTTTGAGGATTATCAGATGGGGTGGGTCCGCCAGGCTCCAG |
| | GGAAGGGTCTAGAGTGGGTCTCATCTATTTATAGTCGTGGTACGCCTACATACTACGCAGAC |
| | TCCGTGAAGGGCCGGTTCACCATCTCCCGCGACGATTCCAAGAACACGCTGTATCTGCAAAT |
| | GAACAGCCTGCGTGCCGAGGACACCGCGGTATATTACTGTGCGCAAAATCTGGTTAGGCTGG |
| | GGAGGTCTAGGTGGATGTTTGACTACTGGGGTCAGGGAACCCTGGTCACAGTCTCGAGC |
| | (SEQ ID NO: 685) |
| ABT2-65- | GAGGTGCAGCTGTTGGAGTCTGGGGGAGGCTTGGTACAGCCTGGGGGGTCCCTGCGTCTCTC |
| 70 | CTGTGTAGCCTCCGGATTCACCTTTGAGGATTATCAGATGGGGTGGGTCCGCCAGGCTCCAG |
| | GGAAGGGTCTAGAGTGGGTCTCATCGATTCCGAGGGTGGGTATGCGGACATACTACGCAGAC |
| | TCCGTGAAGGGCCGGTTCACCATCTCCCGCGACGATTCCAAGAACACGCTGTATCTGCAAAT |
| | GAACAGCCTGCGTGCCGAGGACACCGCGGTATATTACTGTGCGCAAAATCTGGTTAGGCTGG |
| | GGAGGTCTAGGTGGATGTTTGACTACTGGGGTCAGGGAACCCTGGTCACAGTCTCGAGC |
| | (SEQ ID NO: 686) |
| ABT2-65- | GAGGTGCAGCTGTTGGAGTCTGGGGGAGGCTTGGTACAGCCTGGGGGGTCCCTGCGTCTCTC |
| 71 | CTGTATAGCCTCCGGATTCACCTTTGAGGATTATCAGATGGGGTGGGTCCGCCAGGCTCCAG |
| | GGAAGGGTCTAGAGTGGGTCTCAGCTATTCGGAATGTTGGTAGGGCTACATACTACGCAGAC |
| | TCCGTGAAGGGCCGGTTCACCATCTCCCGCGACGATTCCAAGAACACGCTGTATCTGCAAAT |
| | GAACAGCCTGCGTGCCGAGGACACCGCGGTATATTACTGTGCGCAAAATCTGGTTAGGCTGG |
| | GGAGGTCTAGGTGGATGTTTGACTACTGGGGTCAGGGAACCCTGGTCACAGTCTCGAGC |
| | (SEQ ID NO: 687) |
| ABT2-65- | GAGGTGCAGCTGTTGGAGTCTGGGGGAGGCTTGGTACAGCCTGGGGGGTCCCTGCGTCTCTC |
| 72 | CTGTGTAGCCTCCGGATTCACCTTTGAGGATTATCAGATGGGGTGGGTCCGCCAGGCTCCAG |
| | GGAAGGGTCTAGAGTGGGTCTCAGTGATTGGTTTTCCTGGTAGGCTGACATACTACGCAGAC |
| | TCCGTGAAGGGCCGGTTCACCATCTCCCGCGACGATTCCAAGAACACGCTGTATCTGCAAAT |
| | GAACAGCCTGCGTGCCGAGGACACCGCGGTATATTACTGTGCGCAAAATCTGGTTAGGCTGG |
| | GGAGGTCTAGGTGGATGTTTGACTACTGGGGTCAGGGAACCCTGGTCACAGTCTCGAGC |
| | (SEQ ID NO: 688) |
| ABT2-65- | GAGGTGCAGCTGTTGGAGTCTGGGGGAGGCTTGGTACAGCCTGGGGGGTCCCTGCGTCTCTC |
| 73 | CTGTGTAGCCTCCGGATTCACCTTTGAGGATTATCAGATGGGGTGGGTCCGCCAGGCTCCAG |
| | GGAAGGGTCTAGAGTGGGTCTCATCGATTCGGGCGGTTGGTGTTGGTACATACTACGCAGAC |
| | TCCGTGAAGGGCCGGTTCACCATCTCCCGCGACGATTCCAAGGACACGCTGTATCTGCAAAT |
| | GAACAGCCTGCGTGCCGAGGACACCGCGGTATATTACTGTGCGCAAAATCTGGTTAGGCTGG |
| | GGAGGTCTAGGTGGATGTTTGACTACTGGGGTCAGGGAACCCTGGTCACAGTCTCGAGC |
| | (SEQ ID NO: 689) |
| ABT2-65- | GAGGTGCAGCTGTTGGAGTCTGGGGGAGGCTTGGTACAGCCTGGGGGGTCCCTGCGTCTCTC |
| 74 | CTGTGCAGCCTCCGGATTCACCTTTCAGCATTATTATATGGGTTGGGTCCGCCAGGCTCCAG |
| | GGAAGGGTCTAGAGTGGGTCTCATCGATTTCGGCTATGGGTAATCGGACATACTACGCAGAC |
| | TCCGTGAAGGGCCGGTTCACCATCTCCCGCGACGATTCCAAGAACACGCTGTATCTGCAAAT |
| | GAACAGCCTGCGTGCCGAGGACACCGCGGTATATTACTGTGCGCAAAATCTGGTTCGTACTC |
| | AGTCTAAGATGTGGATGTTTGACTACTGGGGTCAGGGAACCCTGGTCACCGTCTCGAGC |
| | (SEQ ID NO: 690) |
| ABT2-65- | GAGGTGCAGCTGTTGGAGTCTGGGGGAGGCTTGGTACAGCATGGGGGGTCCCTGCGTCTCTC |
| 75 | CTGTGTAGCCTCCGGATTCACCTTTGAGGATTATCAGATGGGGTGGGTCCGCCAGGCTCCAG |
| | GGAAGGGTCTAGAGTGGGTCTCATCGATTTCGGCTATGGGTAATCGGACATACTACGCAGAC |
| | TCCGTGAAGGGCCGGTTCACCATCTCCCGCGACGATTCCAAGAACACGCTGTATCTGCAAAT |
| | GAACAGCCTGCGTGCCGAGGACACCGCGGTATATTACTGTGCGCAAAATCTGGTTAGGCTGG |
| | GGAAGTCTAGGTGGATGTTTGACTACTGGGGTCAGGGAACCCTGGTCACAGTCTCGAGC |
| | (SEQ ID NO: 691) |
| ABT2-65- | GAGGTGCAGCTGTTGGAGTCTGGGGGAGGCTTGGTACAGCCTGGGGGGTCCCTGCGTCTCTC |
| 76 | CTGTGTAGCCTCCGGATTCACCTTTGAGGATTATCAGATGGGGTGGGTCCGCCAGGCTCCGG |
| | GGAAGGGTCTAGAGTGGGTCACATCGATTTCGGCTATGGGTAATCGGACATACTACGCAGAC |
| | TCCGTGAAGGGCCGGTTCACCATCTCCCGCGACGATTCCAAGAACACGCTGTACCTGCAAAT |
| | GAACAGCCTGCGTGCCGAGGACACCGCGGTATATTACTGTGCGCAAAATCTGGTTAGGCTGG |
| | GGAGGTCTAGGTGGATGTTTGACTACTGGGGTCAGGGAACCCTGGTCACAGTCTCGAGC |
| | (SEQ ID NO: 692) |
| ABT2-65- | GAGGTGCAGCTGTTGGAGTCTGGGGGAGGCTTGGTACAGCATGGGGGGTCCCTGCGTCTCTC |
| 77 | CTGTGTAGCCTCCGGATTCACCTTTGAGGATTATCAGATGGGGTGGGTCCGCCAGGCTCCAG |
| | GGAAGGGTCTAGAGTGGGTCTCATCGATTTCGGCTATGGGTAATCGGACATACTACGCAGAC |
| | TCCGTGAAGGGCCGGTTCACCATCTCCCGCGACGATTCCAAGAACACGCTGTATCTGCAAAT |
| | GAACAGCCTGCGTGCCGAGGACACCGCGGTATATTACTGTGCGCAAAATCTGGTTAGGCTGG |
| | GGAGGTCTAGGTGGATGTTTGACTACTGGGGTCAGGGAACCTTGGTCACTGTCTCGAGC |
| | (SEQ ID NO: 693) |
| ABT2-65- | GAGGTGCAGCTGTTGGAGTCTGGGGGAGGCTTGGTACAGCATGGGGGGTCCCTGCGTCTCTC |
| 75 | CTGTGTAGCCTCCGGATTCACCTTTGAGGATTATCAGATGGGGTGGGTCCGCCAGGCTCCAG |
| | GGAAGGGTCTAGAGTGGGTCTCATCGATTTCGGCTATGGGTAATCGGACATACTACGCAGAC |
| | TCCGTGAAGGGCCGGTTCACCATCTCCCGCGACGATTCCAAGAACACGCTGTATCTGCAAAT |
| | GAACAGCCTGCGTGCCGAGGACACCGCGGTATATTACTGTGCGCAAAATCTGGTTAGGCTGG |
| | GGAAGTCTAGGTGGATGTTTGACTACTGGGGTCAGGGAACCCTGGTCACAGTCTCGAGC |
| | (SEQ ID NO: 691) |
| ABT2-65- | GAGGTGCAGCTGTTGGAGTCTGGGGGAGGCTTGGTACAGCCTGGGGGGTCCCTGCGTCTCTC |
| 76 | CTGTGTAGCCTCCGGATTCACCTTTGAGGATTATCAGATGGGGTGGGTCCGCCAGGCTCCGG |
| | GGAAGGGTCTAGAGTGGGTCACATCGATTTCGGCTATGGGTAATCGGACATACTACGCAGAC |
| | TCCGTGAAGGGCCGGTTCACCATCTCCCGCGACGATTCCAAGAACACGCTGTACCTGCAAAT |
| | GAACAGCCTGCGTGCCGAGGACACCGCGGTATATTACTGTGCGCAAAATCTGGTTAGGCTGG |
| | GGAGGTCTAGGTGGATGTTTGACTACTGGGGTCAGGGAACCCTGGTCACAGTCTCGAGC |
| | (SEQ ID NO: 692) |
| ABT2-65- | GAGGTGCAGCTGTTGGAGTCTGGGGGAGGCTTGGTACAGCATGGGGGGTCCCTGCGTCTCTC |
| 77 | CTGTGTAGCCTCCGGATTCACCTTTGAGGATTATCAGATGGGGTGGGTCCGCCAGGCTCCAG |
| | GGAAGGGTCTAGAGTGGGTCTCATCGATTTCGGCTATGGGTAATCGGACATACTACGCAGAC |
| | TCCGTGAAGGGCCGGTTCACCATCTCCCGCGACGATTCCAAGAACACGCTGTATCTGCAAAT |
| | GAACAGCCTGCGTGCCGAGGACACCGCGGTATATTACTGTGCGCAAAATCTGGTTAGGCTGG |
| | GGAGGTCTAGGTGGATGTTTGACTACTGGGGTCAGGGAACCTTGGTCACTGTCTCGAGC |
| | (SEQ ID NO: 693) |
| ABT2-65- | GAGGTGCAGCTGTTGGAGTCTGGGGGAGGCTTGGTACAGCCTGGGGGGTCCCTGCGTCTCTC |
| 78 | CTGTGTAGCCTCCGGATTCACCTTTGAGGATTATCAGATGGGGTGGGTCCGCCAGGCTCCAG |
| | GGAAGGGTCTAGAGTGGGTCTCATCGATTTCGGCTATGGGTAATCGGACATACTACGCAGAC |
| | TCCGTGAAGGGCCGGTTCACCATCTCCCGCGACGATTCCAAGAACACGCTGTATCTGCAAAT |
| | GAACAGCCTGCGTGCCGAGGACACCGCGGTATATTACTGTGCGCAAAATCTGGTTAGGCTGG |
| | GGACGTCTAGGTGGATGTTTGACTACTGGGGTCAGGGAGCCCTGGTCACAGTCTCGAGC |
| | (SEQ ID NO: 694) |
| ABT2-65- | GAGGTGCAGCTGTTGGAGTCTGGGGGAGGCTTGGTACAGCCTGGGGGGTCCCTGCGTCTCTC |
| 79 | CTGTGTAGCCTCCGGATTCACCTTTGAGGATTATCAGATGGGGTGGGTCCGCCAGGCTCCAG |
| | GGAAGGGTCTAGAGTGGGTCTCATCGATTTCGGCTATGGGTAATCGGACATACTACGCAGAC |
| | TCCGTGAAGGGCCGGTTCACCATCTCCCGCGACGATTCCAAGAACACGCTGTATCTGCAAAT |
| | GAACAGCCTGCGTGCCGGGGACACCGCGGTATATTACTGTGCGCAAAATCTGGTTAGGCTGG |
| | GGAGGTCTAGGTGGATGTTTGACTACTGGGGTCAGGGAACCATGGTCACAGTCTCGAGC |
| | (SEQ ID NO: 695) |
| ABT2-65- | GAGGTGCAGCTGTTGGAGTCTGGGGGAGGCTTGGTACAGCCTGGGGGGTCCCTGCGTCTCGC |
| 80 | CTGTGTAGCCTCCGGATTCACCTTTGAGGATTATCAGATGGGGTGGGTCCGCCAGGCTCCAG |
| | GGAAGGGTCTAGAGTGGGTCTCATCGATTTCGGCTATGGGTAATCGGACATACTACGCAGAC |
| | TCCGTGAAGGGTCGGTTCACCATCTCCCGCGACGATTCCAAGAACACGCTGTATCTGCAAAT |
| | GAACAGCCTGCGTGCCGAGGACACCGCGGTATATTACTGTGCGCAAAATCTGGTTAGGCTGG |
| | GGAGGTCTAGGTGGATGTTTGACTACTGGGGTCAGGGAACCCTGGTCACAGTCTCGAGC |
| | (SEQ ID NO: 696) |
| ABT2-65- | GAGGTGCAGCTGTTGGAGTCTGGGGGAGGCTTGGTACAGCCTGGGGGGTCCCTGCGTCTCTC |
| 81 | CTGTGTAGCCTCCGGATTCACCTTTGAGGAATATCAGATGGGGTGGGTCCGCCAGGCTCCAG |
| | GGAAGGGTCTAGAGTGGGTCTCATCGATTTCGGCTATGGGTAATCGGACATACTACGCAGAC |
| | TCCGTGAAGGGCCGGTTCACTATCTCCCGCGACGATTCCAAGAACACGCTGTATCTGCAAAT |
| | GAACAGCCTGCGTGCCGAGGACACCGCGGTATATTACTGTGCGCAAAATCTGGTTAGGCTGG |
| | GGAGGTCTAGGTGGATGTTTGACTACTGGGGTCAGGGAACCCTGGTCACAGTCTCGAGC |
| | (SEQ ID NO: 697) |
| ABT2-65- | GAGGTGCAGCTGTTGGAGTCTGGGGGAGGCTTGGTACGGCCTGGGGGGTCCCTGCGTCTCTC |
| 82 | CTGTGTAGCCTCCGGATTCACCTTTGAGGATTATCAGATGGGGTGGGTCCGCCAGGCTCCAG |
| | GGAAGGGTCTAGAGTGGGTCTCATCGATTTCGGCTATGGGTAATCGGACATACTACGCAGAC |
| | TCCGTGAAGGGCCGGTTCACCATCTCCCGCGACGATCCCAAGAACACGCTGTATCTGCAAAT |
| | GAACAGCCTGCGTGCCGAGGACACCGCGGTATATTACTGTGCGCAAAATCTGGTTAGGCTGG |
| | GGAGGTCTAGGTGGATGTTTGACTACTGGGGTCAGGGAACCCTGGTCACAGTCTCGAGC |
| | (SEQ ID NO: 698) |
| ABT2-65- | GAGGTGCAGCTGTTGGAGTCTGGGGGAGGCTTGGTACAGCCTGGGGGGTCCCTGCGTCTCTC |
| 83 | CTGTGTAGCCTCCGGATTCACCTTTGAGGATTATCAGATGGGGTGGGTCCGCCAGGCTCCAG |
| | GGAAGGGTCTAGAGTGGGTCTCATCGATTTCGGCTATGGGTAATCGGACATACTACGCAGAC |
| | TCCGTGAAGGGCCGGTTCACCATCTCCCGCGACGATTCCAAGAACACGCTGTATCTGCAAAT |
| | GAACAGCCAGCGTGCCGAGGACACCGCGGTATATTACTGTGCGCAAAATCTGGTTAGGCTGG |
| | GGAGGTCTAGGTGGATGTTTGACTACTGGGGTCAGGGAACCCTGGTCACAGTCTCGAGC |
| | (SEQ ID NO: 699) |
| ABT2-65- | GAGGTGCAGCTGTTGGAGTCTGGGGGAGGCTTGGTACAGCCTGGGGGGTCCCTGCGTCTCTC |
| 84 | CTGTGTAGCCTCCGGATTCTCCTTTGAGGATTATCAGATGGGGTGGGTCCGCCAGGCTCCAC |
| | GGAAGGGTCTAGAGTGGATCTCATCGATTTCGGCTATGGGTAATCGGACATACTACGCAGAC |
| | TCCGTGAAGGGCCGGTTCACCATCTCCCGCGACGATTCCAAGAACACGCTGTATCTGCAAAT |
| | GAACAGCCTGCGTGCCGAGGACACCGCGGTATATTACTGTGCGCAAAATCTGGTTAGGCTGG |
| | GGAGGTCTAGGTGGATGTTTGACTACTGGGGTCAGGGAACCCTGGTCACAGTCTCGAGC |
| | (SEQ ID NO: 700) |
| ABT2-65- | GAGGTGCAGCTGATGGAGTCTGGGGGAGGCTTGGTACAGCCTGGGGGGTCCCTGCGTCTCTC |
| 85 | CTGTGTAGCCTCCGGATTCACCTTTGAGGATTATCAGATGGGGTGGGTCCGCCAGGCTCCAG |
| | GGAAGGGTCTAGAGTGGGTCTCATCGATTTCGGCTATGGGTAACCGGACATACTACGCAGAC |
| | TCCGTGAAGGGCCGGTTCGCCATCTCCCGCGACGATTCCAAGAACACGCTGTATCTGCAAAT |
| | GAACAGCCTGCGTGCCAAGGACACCGCGGTATATTACTGTGCGCAAAATCTGGTTAGGCTGG |
| | GGAGGTCTAGGTGGATGTTTGACTACTGGGGTCAGGGAACCCTGGTCACAGTCTCGAGC |
| | (SEQ ID NO: 701) |
| ABT2-65- | GAGGTGCAGCTGTTGGAGTCTGGGGGAGGCTTGGTACGGCCTGGGGGGTCCCAGCGTCTCTC |
| 86 | CTGTGTAGCCTCCGGATTCACCTCTGAGGATTATCAGATGGGGTGGGTCCGCCAGGCTCCAG |
| | GGAAGGGTCTAGAGTGGGTCTCATCGATTTCGGCTATGGGTAATCGGACATACTACGCAGAC |
| | TCCGTGAAGGGCCGGTTCACCATCTCCCGCGACGATTCCAAGAACACGCTGTATCTGCAAAT |
| | GAACAGCCTGCGTGCCGAGGACACCGCGGTATATTACTGTGCGCAAAATCTGGTTAGGCTGG |
| | GGAGGTCTAGGTGGATGTTTGACTACTGGGGTCAGGGAACCCTGGTCACAGTCTCGAGC |
| | (SEQ ID NO: 702) |
| ABT2-65- | GAGGTGCAGCTGTTGGAGTCTGGGGGAGGCTTGGTACAGCCTGGGGGGTCCCTGCGTCTCTC |
| 87 | CTGTGTAGCCTCCGGATTCACCTTTGAGGATTATCAGATGGGGTGGGTCCGCCAGGCTCCAG |
| | GGAAGGATCTAGAGTGGGTCTCATCGATTTCGGCTATGGGTAATCGGACATACTACGCAGAC |
| | TCCGTGAAGGGCCGGTTCACCATCTCCCGCGACGATTCCAAGAACACGCTGTATCTGCAAAT |
| | GAACAGCCTGCGTGCCGAGGACACCGCGGTATATTACTGTGCGCAAAATCTGGTTAGGCTGG |
| | GGAGGTCTAGGTGGATGTTTGACTACTGGGGTCAGGGAACCCTGGTCACAGTCTCGAGC |
| | (SEQ ID NO: 703) |
| ABT2-65- | GAGGTGCAGTTGTTGGAGTCTGGGGGAGGCTTGGTACAGCCTGGGGGGTCCCTGCGTCTCTA |
| 88 | CTGTGTAGCCTCCGGATTCACCTTTGAGGATTATCAGATGGGGTGGGTCCGCCAGGCTCCAG |
| | GGAAGGGTCTAGAGTGGGTCTCATCGATTTCGGCTATGGGTAATCGGACATACTACGCAGAC |
| | TCCGTGAAGGGCCGGTTCACAATCTCCCGCGACGATTCCAAGAACACGCTGTATCTGCAAAT |
| | GAACAGCCTGCGTGCCGAGGACACCGCGGTATATTACTGTGCGCAAAATCTGGTTAGGCTGG |
| | GGAGGTCTAGGTGGATGTTTGACTACTGGGGTCAGGGAACCCTGGTCACAGTCTCGAGC |
| | (SEQ ID NO: 704) |
| ABT2-65- | GAGGTGCAGCTGTTGGAGTCTGGGGGAGGCTTGGTACAGCCTGGGGGGTCCCTGCGTCTCTC |
| 89 | CTGTGTAGCCTCCGGATTCACCTTTGAGGATTATCAGATGGGGTGGGTCCGCCAGGCTCCAG |
| | GGAAGGGTCTAGAGTGGGTCTCATCGATTTCGGCTATGGGTAATCGGACATACTACGCAGAC |
| | TCCGTGAAGGGCCGGTTCACCATCTCCCGCGACGATTCCAAGAACACGCTGTATCTGCAAAT |
| | GAACAGCCTGCGAGCCGAGGACACCGCGGTATATTACTGTGCGCAAAATATGGTTAGGCTGG |
| | GGAGGTCTAGGTGGATGTTTGACTACTGGGGTCAGGGAACCCTGGTCACAGTCTCGAGC |
| | (SEQ ID NO: 705) |
| ABT2-65- | GAGGTGCAGCTGTTGGAGTCTGGGGGAGGCTTGGTACAGCCTGGGGGGTCCCTGCGTCTCTC |
| 90 | CTGTGTAGCCTCCGGATTCACCTTTGAGGATTATCAGATGGGGTGGGTCCGCCAGGCTCCAG |
| | GGAAGGGTCAAGAGTGGGTCTCATCGATTTCGGCTATGGGTAATCGGACATACTACGCAGAC |
| | TCCGTGAAGGGCCGGTTCACCATCTCCCGCGACGATTCCAAGAACACGCTGTATCTGCAAAT |
| | GAACAGCCTGCGTGCCGAGGACACCGCGGTATATTACTGTGCGCAAAATCTGGTTAGGCTGG |
| | GGAGGTCTAGGTGGATGTTTGACTACTGGGGTCACGGAACCCTGGTCACAGTCTCGAGC |
| | (SEQ ID NO: 706) |
| ABT2-65- | GAGGTGCAGCTGTTGGAGTCTGGGGGAGGCTTGGTACAGCCTGGGGGGTCCCTGCGTCTCTC |
| 113 | CTGTGCAGCCTCCGGATTCACCTTTGTGCAGTATCAGATGGGTTGGGTCCGCCAGGCTCCAG |
| | GGAAGGGTCTAGAGTGGGTCTCATCGATTTCGGCTATGGGTAATCGGACATACTACGCAGAC |
| | TCCGTGAAGGGCCGGTTCACCATCTCCCGCGACGATTCCAAGAACACGCTGTATCTGCAAAT |
| | GAACAGCCTGCGTGCCGAGGACACCGCGGTATATTACTGTGCGCAAAATCTGGTTAGGCTGG |
| | GGAGGTCTAGGTGGATGTTTGACTACTGGGGTCAGGGAACCCTGGTCACAGTCTCGAGC |
| | (SEQ ID NO: 707) |
| ABT2-65- | GAGGTGCAGCTGTTGGAGTCTGGGGGAGGCTTGGTACAGCCTGGGGGGTCCCTGCGTCTCTC |
| 114 | CTGTGCAGCCTCCGGATTCACCTTTAGGGAGTATATGATGGGTTGGGTCCGCCAGGCTCCAG |
| | GGAAGGGTCTAGAGTGGGTCTCATCGATTTCGGCTATGGGTAATCGGACATACTACGCAGAC |
| | TCCGTGAAGGGCCGGTTCACCATCTCCCGCGACGATTCCAAGAACACGCTGTATCTGCAAAT |
| | GAACAGCCTGCGTGCCGAGGACACCGCGGTATATTACTGTGCGCAAAATCTGGTTAGGCTGG |
| | GGAGGTCTAGGTGGATGTTTGACTACTGGGGTCAGGGAACCCTGGTCACAGTCTCGAGC |
| | (SEQ ID NO: 708) |
| ABT2-65- | GAGGTGCAGCTGTTGGAGTCTGGGGGAGGCTTGGTACAGCCTGGGGGGTCCCTGCGTCTCTC |
| 115 | CTGTGCAGCCTCCGGATTCACCTTTATTGATTATCAGATGGGGTGGGTCCGCCAGGCTCCAG |
| | GGAAGGGTCTAGAGTGGGTCTCATCGATTTCGGCTATGGGTAATCGGACATACTACGCAGAC |
| | TCCGTGAAGGGCCGGTTCACCATCTCCCGCGACGATTCCAAGAACACGCTGTATCTGCAAAT |
| | GAACAGCCTGCGTGCCGAGGACACCGCGGTATATTACTGTGCGCAAAATCTGGTTAGGCTGG |
| | GGAGGTCTAGGTGGATGTTTGACTACTGGGGTCAGGGAACCCTGGTCACAGTCTCGAGC |
| | (SEQ ID NO: 709) |
| ABT2-65- | GAGGTGCAGCTGTTGGAGTCTGGGGGAGGCTTGGTACAGCCTGGGGGGTCCCTGCGTCTCTC |
| 116 | CTGTGCAGCCTCCGGATTCACCTTTGCGGGTTATTATATGGGTTGGGTCCGCCAGGCTCCAG |
| | GGAAGGGTCTAGAGTGGGTCTCATCGATTTCGGCTATGGGTAATCGGACATACTACGCAGAC |
| | TCCGTGAAGGGCCGGTTCACCATCTCCCGCGACGATTCCAAGAACACGCTGTATCTGCAAAT |
| | GAACAGCCTGCGTGCCGAGGACACCGCGGTATATTACTGTGCGCAAAATCTGGTTAGGCTGG |
| | GGAGGTCTAGGTGGATGTTTGACTACTGGGGTCAGGGAACCCTGGTCACAGTCTCGAGC |
| | (SEQ ID NO: 710) |
| ABT2-65- | GAGGTGCAGCTGTTGGAGTCTGGGGGAGGCTTGGTACGGCCTGGGGGGTCCCTGCGTCTCTC |
| 117 | CTGTGTAGCCTCCGGATTCACCTTTGAGGATTATCAGATGGGGTGGGTCCGCCAGGCTCCAG |
| | GGAAGGGTCTAGAGTGGATCTCATCGATTTCGGCTATGGGTAATCGGACATACTACGCAGAC |
| | TCCGTGAAGGGCCGGTTCACCATCTCCCGCGACGATTCCAAGAACACGCTGTATCTGCAAAT |
| | GAACAGCCTGCGTGCCGAGGACACCGCGGTATATTACTGTGCGCAAAATCTGGTTAGGCTGG |
| | GGAGGTCTAGGTGGATGTTTGACTACTGGGGTCAGGGAACCCTGGTCACAGTCTCGAGC |
| | (SEQ ID NO: 711) |
| ABT2-65- | GAGGTGCAGCTGTTGGAGTCTGGGGGAGGCTTGGTACAGCCTGGGGGGTCCCTGCGTCTCTC |
| 118 | CTGTGCAGCCTCCGGATTCACCTTTGCGACTTATACGATGGGTTGGGTCCGCCAGGCTCCAG |
| | GGAAGGGTCTAGAGTGGGTCTCATCGATTTCGGCTATGGGTAATCGGACATACTACGCAGAC |
| | TCCGTGAAGGGCCGGTTCACCATCTCCCGCGACGATTCCAAGAACACGCTGTATCTGCAAAT |
| | GAACAGCCTGCGTGCCGAGGACACCGCGGTATATTACTGTGCGCAAAATCTGGTTAGGCTGG |
| | GGAGGTCTAGGTGGATGTTTGACTACTGGGGTCAGGGAACCCTGGTCACAGTCTCGAGC |
| | (SEQ ID NO: 712) |
| ABT2-65- | GAGGTGCAGCTGTTGGAGTCTGGGGGAGGCTTGGTACAGCCTGGGGGGTCCCTGCGTCTCTC |
| 119 | CTGTGCAGCCTCCGGATTCACCTTTATTGCGTATCCGATGGGTTGGGTCCGCCAGGCTCCAG |
| | GGAAGGGTCTAGAGTGGGTCTCATCGATTTCGGCTATGGGTAATCGGACATACTACGCAGAC |
| | TCCGTGAAGGGCCGGTTCACCATCTCCCGCGACGATTCCAAGAACACGCTGTATCTGCAAAT |
| | GAACAGCCTGCGTGCCGAGGACACCGCGGTATATTACTGTGCGCAAAATCTGGTTAGGCTGG |
| | GGAGGTCTAGGTGGATGTTTGACTACTGGGGTCAGGGAACCCTGGTCACAGTCTCGAGC (SEQ |
| | ID NO: 713) |
| ABT2-65- | GAGGTGCAGCTGTTGGAGTCTGGGGGAGGCCTGGTACAGCCTGGGGGGTCCCTGCGTCTCTC |
| 120 | CTGTGTAGCCTCCGGATTCACCTTTGAGGATTATCAGATGGGGTGGGTCCGCCAGGCTCCAG |
| | GGAAGGGTCTAGAGTGGGTCTCATCGATTTCTGCTATGGGTATGCGGACATACTACGCAGAC |
| | TCCGTGAAGGGCCGGTTCACCATCTCCCGCGACGATTCCAAGAACACGCTGTATCTGCAAAT |
| | GAACAGCCTGCGTGCCGAGGACACCGCGGTATATTACTGTGCGCAAAATCTGGTTAGGCTGG |
| | GGAGGTCTAGGTGGATGTTTGACTACTGGGGTCAGGGAACCCTGGTCACAGTCTCGAGC |
| | (SEQ ID NO: 714) |
| ABT2-65- | GAGGTGCAGCTGTTGGAGTCTGGGGGAGGCTTGGTACAGCCTGGGGGGTCCCTGCGTCTCTC |
| 121 | CTGTGTAGCCTCCGGATTCACCTTTGAGGATTATCAGATGGGGTGGGTCCGCCAGGCTCCAG |
| | GGAAGGGTCTAGAGTGGGTCTCATCTATTGCGGCTCATGGTAATAGGACATACTACGCAGAC |
| | TCCGTGAAGGGCCGGTTCACCATCTCCCGCGACGATTCCAAGAACACGCTGTATCTGCAAAT |
| | GAACAGCCTGCGTGCCGAGGACACCGCGGTATATTACTGTGCGCAAAATCTGGTTAGGCTGG |
| | GGAGGTCTAGGTGGATGTTTGACTACTGGGGTCAGGGAACCCTGGTCACAGTCTCGAGC |
| | (SEQ ID NO: 715) |
| ABT2-65- | GAGGTGCAGCTGTTGGAGTCTGGGGGAGGCTTGGTACGGCCTGGGGGGTCCCTGCGTCTCTC |
| 122 | CTGTGTAGCCTCCGGATTCACCTTTGAGGATTATCAGATGGGGTGGGTCCGCCAGGCTCCAG |
| | GGAAGGGTCTAGAGTGGGTCTCATCGATTTCGGCTATGGGTAATCGGACATACTACGCAGAC |
| | TCCGTGAAGGGCCGGTTCACCATCTCCCGCGACGATTCCAAGAACACGCTGTATCTGCAAAT |
| | GAACAGCCTGCGTGCCGAGGACACCGCGGTATATTACTGTGCGCAAAATCTGGTTAGGCTGG |
| | GGAGGTCTAGGTGGATGTTTGACTACTGGGGTCAGGGAACCCTGGTCACAGTCTCGAGC |
| | (SEQ ID NO: 716) |
| ABT2-65- | GAGGTGCAGCTGTTGGAGTCTGGGGGAGGCTTGGTACAGCCTGGGGGGTCCCTGCGTCTCTC |
| 123 | CTGTGTAGCCTCCGGATTCACCTTTGAGGATTATCAGATGGGGTGGGTCCGCCAGGCTCCAG |
| | GGAAGGGTCTAGAGTGGGTCTCATCGATTTCGGCTATGGGTAATCGGAGATACTACGCAGAC |
| | TCCGTGAAGGGCCGGTTCACCATCTCCCGCGACAATTCCAAGAACACGCTGTATCTGCAAAT |
| | GAACATCCTGCGTGCCGAGGACACCGCGGTATATTACTGTGCGCAAAATCTGGTTAGGCTGG |
| | GGAGGTCTAGGTGGGTGTTTGACTACTGGGGTCAGGGAACCCTGGTCACAGTCTCGAGC |
| | (SEQ ID NO: 717) |
| ABT2-65- | GAGGTGCAGCTGTTGGAGTCTGGGGGAGGCTTGGTACAGCCTGGGGGGTCCCTGCGTCTCTC |
| 124 | CTGTGTAGCCTCCGGATTCACCTTTGAGGATTATCAGATGGGGTGGGTCCGCCAGGCTCCAG |
| | GGAAGGGTCTAGAGTGGGTCTCATCGATTTCGGCTGTGGGTAATCGGACATACTACGCAGAC |
| | TCCGTGAAGGGCCGGTTCACCATCTCCCGCGACGATTCCAAGAACACGCTGTATCTGCAAAT |
| | GAACAGCCTGCGTGCCGAGGACATCGCGGTATATTACTGTGCGCAAAATCTGGTTAGGCTGG |
| | GGAGGTCTAGGTGGATGTTTGACTACTGGGGTCAGGGAACCCTGGTCACAGTCTCGAGC |
| | (SEQ ID NO: 718) |
| ABT2-65- | GAGGTGCAGCTGTTGGAGTCTGGGGGAGGCTTGGTACAGCCTGGGGGGTCCCTGCGTCTCTC |
| 125 | CTGTGTAGCCTCCGGATTCACCTTTGAGGATTATCAGATGGGGTGGGTCCGCCAGGCTCCAG |
| | GGAAGGGTCTAGAGTGGATCTCATCGATTTCGGCTATGGGTAATCGGACATACTACGCAGAC |
| | TCCGTGAAGGGCCGGTTCACCATCTCCCGCGACGATTCCAAGAACACGCTGTATCTGCAAAT |
| | GAACAGCCTGCGTGCCGAGGACACCGCGGTATATTACTGTGCGCAAAATCTGGTTAGGCTGG |
| | GGAGGTCTAGGTGGATGTTTGACTACTGGGGTCAGGGAACCCTGGTCACAGTCTCGAGC |
| | (SEQ ID NO: 719) |
| ABT2-65- | GAGGTGCAGCTGTTGGAGTCTGGGGGAGGCTTGGTACAGCCTGGGGGGTCCCTGCGTATCTC |
| 126 | CTGTGTAACCTCCGGGTTCACCTTTGAGGATTATCAGATGGGGTGGGTCCGCCAGGCTCCAG |
| | GGAAGGGTCTAGAGTGGGTCTCATCGATTTCGGCTATGGGTAATCGGACATACTACGCAGAC |
| | TCCGTGAAGGGCCGGTTCACCATCTCCCGCGACGATTCCAAGAACACGCTGAATCTGCAAAT |
| | GAACAGCCTGCGTGCCGAGGACACCGCGGTATATTACTGTGCGCAAAATCTGGTTAGGCTGG |
| | GGAGGTCTAGGTGGGTGTTTGACTACTGGGGTCAGGGAACCCTGGTCACAGTCTCGAGC |
| | (SEQ ID NO: 720) |
| ABT2-65- | GAGGTGCAGCTGTTGGAGTCTGGGGGAGGCTTGGTACAGCCTGGGGGGTCCCTGCGTCTCTC |
| 127 | CTGTGTAGCCTCCGGATTCACCTTTGAGGATTATCAGATGGGGTGGGTCCGCCAGGCTCCAG |
| | GGAAGGGTCTAGAGTGGGTCACATCGATTTCGGCTATGGGTAATCGGACATACTACGCAGAC |
| | TCCGTGAAGGGCCGGTTCACCATCTCCCGCGACGATTCCAAGAACACGCTGTATCTGCAAAT |
| | GAACAGCCTGCGTGCCGAGGACACCGCGGTATATTACTGTGCGCAAAATCTGGTTAGGCTGG |
| | GGAGGTCTAGGTGGATGTTTGACTACTGGGGTCAGGGAACCCTGGTCACAGTCTCGAGC |
| | (SEQ ID NO: 721) |
| ABT2-65- | GAGGTGCAGCTGTTGGAGTCTGGGAGAGGCTTGGTACAGCCTGGGGGGTCCCTGCGTCTCTC |
| 128 | CTGTGTAGCCTCCGGATTCACCTTTGAGGATTATCAGATGGGGTGGGTCCGCCAGGCTCCAG |
| | GGAAGGGTCTAGAGTGGGTCTCATCGATTTCGGATATGGGTAATCGGACATACTACGCAGAC |
| | TCCGTGAAGGGCCGGTTCACCATCTCCCGCGACGATTCCAAGAACACGCTGTATCTGCAAAT |
| | GAACAGCCTGCGTGCCGAGGACACCGCGGTATATTACTGTGCGCAAAATCTGGTTAGGCTGG |
| | GGAGGTCTAGGTGGATGTTTGACTACTGGGGTCAGGGAACCCTGGTCACAGTCTCGAGC |
| | (SEQ ID NO: 722) |
| ABT2-65- | GAGGTGCAGCTGTTGGAGTCTGGGGGAGGCTTGGTACAGCCTGGGGGGTCCCTGCGTCTCTC |
| 129 | CTGTGTAGCCTCCGGTTTCACCTTTGAGGATTATCAGATGGGGTGGGTCCGCCAGGCTCCAG |
| | GGAAGGGTCTAGAGTGGGTCTCAACGGTTTCGGCTATGGGTAATCGGACATACTACGCAGAC |
| | TCCATGAAGGGCCGGTTCACCATCTCTCGCGACGATTCCAAGAACACGCTGTATCTGCAAAT |
| | GAACAGCCTGCGTGCAGAGGACACCGCGGTATATTACTGTGCGCAAAATCTGGTTAGGCTGG |
| | GGAGGTCTAGGTGGATGTTTGACTACTGGGGTCAGGGAACCCTGGTCACAGTCTCGAGC |
| | (SEQ ID NO: 723) |
| ABT2-65- | GAGGTGCAGCTGTTGGAGTCTGGGGGAGGCTTGGTACAGCCTGGGGGGTCCCTGCGTCTCTC |
| 130 | CTGTGTAGCCTCCGGATTCACCTTTGAGGATTATCAGATGGGGTGGGTCCGCCAGGCTCCAG |
| | GGAAGGGTCTAGAGTGGGTCTCATCGATTTCGGCTATGGTTAATCGGACATACTACGCAGAC |
| | TCCGTGAAGGGCAGGTTCACCATCTCCCGCGACGATTCCAAGAACACGCTGTATCTGCAAAT |
| | GAACAGCCTGCGTGCCGAGGACACCGCGGTATATTACTGTGCGCAAAATCTGGTTAGGCTGG |
| | GGAGGTCTAGGTGGATGTTTGACTACTGGGGTCAGGGAACCCTGGTCACAGTCTCGAGC |
| | (SEQ ID NO: 724) |
| ABT2-65- | GAGGTGCAGCTGTTGGAGTCTGGGGGAGGCTTGGTACAGCCTCGGGGGTCCCTGCGTCTCTC |
| 131 | CTGTGTAGCCTCCGGATTCACCTTTGAGGATTATCAGATGGGGTGGGTCCGCCAGGCTCCAG |
| | GCAAGGGTCTAGAGTGGGTCTCATCGATTTCGACTATGGGTAATCGGACATACTACGCAGAC |
| | TCCGTGAAGGGCCGGTTCACCATCTCCCGCGACGATTCCAAGAACACGCTGTATCTGCAAAT |
| | GAACAGCCTGCGTGCAGAGGACACCGCGGTATATCACTGTGCGCAAAATCTGGTTAGGTTGG |
| | GGAGGTCTAGGTGGATGTTTGACTACTGGGGTCAGGGAACCCTGGTCACAGTCTCGAGC |
| | (SEQ ID NO: 725) |
| ABT2-65- | GAGGTGCAGCTGTTGGAGTCTGGGGGAGGCTTGGTACAGCCTGGGGGGTCCCTGCGTCTCTC |
| 132 | CTGTGCAGCCTCCGGATTCACCTTTGAGGATTATCAGATGGGGTGGGTCCGCCAGGCTCCAG |
| | GGAAGGGTCTAGAGTGGGTCTCATCGATTTCGGCTATGGGTAATCGGACATACTACGCAGAC |
| | TCCGTGAAGGGCCGGTTCACCATCTCCCGCGACGATTCCAAGAACACGCTGTATCTGCAAAT |
| | GAACAGCCTGCGTGCCGAGGACACCGCGGTATATTACTGTGCGGAAAATCTGGTTCGTCTTG |
| | CTTCGAGGAGGTGGATGTTTGACTACTGGGGTCAGGGAACCCTGGTCACCGTCTCGAGC |
| | (SEQ ID NO: 726) |
| ABT2-65- | GAGGTGCAGCTGTTGGAGTCTGGGGGAGGCTTGGTACAGCCTGGGGGGTCCCTGCGTCTCTC |
| 133 | CTGTGCAGCCTCCGGATTCACCTTTGAGGATTATCAGATGGGGTGGGTCCGCCAGGCTCCAG |
| | GGAAGGGTCTAGAGTGGGTCTCATCGATTTCGGCTATGGGTAATCGGACATACTACGCAGAC |
| | TCCGTGAAGGGCCGGTTCACGATCTCCCGCGACGATTCCAAGAACACGCTGTATCTGCAAAT |
| | GAACAGCCTGCGTGCCGAGGACACCGCGGTATATTACTGTGCGGAAAATCTGGTTCATTGGA |
| | AGAGGGGGGGTTGGATGTTTGACTACTGGGGTCAGGGAACCCTGGTCACCGTCTCGAGC |
| | (SEQ ID NO: 727) |
| ABT2-65- | GAGGTGCAGCTGTTGGAGTCTGGGGGAGGCTTGGTACAGCCTGGGGGGTCCCTGCGTCTCTC |
| 134 | CTGTGCAGCCTCCGGATTCACCTTTGAGGATTATCAGATGGGGTGGGTCCGCCAGGCTCCAG |
| | GGAAGGGTCTAGAGTGGGTCTCATCGATTTCGGCTATGGGTAATCGGACATACTACGCAGAC |
| | TCCGTGAAGGGCCGGTTCACCATCTCCCGCGACGATTCCAAGAACACGCTGTATCTGCAAAT |
| | GAACAGCCTGCGTGCCGAGGACACCGCGGTATATTACTGTGCGGAAAATCTGGTTAAGTTGT |
| | CTAAGAGTCGTTGGATGTTTGACTACTGGGGTCAGGGAACCCTGGTCACCGTCTCGAGC |
| | (SEQ ID NO: 728) |
| ABT2-65- | GAGGTGCAGCTGTTGGAGTCTGGGGGAGGCTTGGTACAGCCTGGGGGGTCCCTGCGTCTCTC |
| 135 | CTGTGCAGCCTCCGGATTCACCTTTGAGGATTATCAGATGGGGTGGGTCCGCCAGGCTCCAG |
| | GGAAGGGTCTAGAGTGGGTCTCATCGATTTCGGCTATGGGTAATCGGACATACTACGCAGAC |
| | TCCGTGAAGGGCCGGTTCACCATCTCCCGCGACGATTCCAAGAACACGCTGTATCTGCAAAT |
| | GAACAGCCTGCGTGCCGAGGACACCGCGGTATATTACTGTGCGGAAAATCTGGTTAGGATTA |
| | AGAAGATGAAGTGGATGTTTGACTACTGGGGTCAGGGAACCCTGGTCACCGTCTCGAGC |
| | (SEQ ID NO: 729) |
| ABT2-65- | GAGGTGCAGCTGTTGGAGTCTGGGGGAGGCTTGGTACAGCCTGGGGGGTCCCTGCGTCTCTC |
| 136 | CTGTGCAGCCTCCGGATTCACCTTTGAGGATTATCAGATGGGGTGGGTCCGCCAGGCTCCAG |
| | GGAAGGGTCTAGAGTGGGTCTCATCGATTTCGGCTATGGGTAATCGGACATACTACGCAGAC |
| | TCCGTGAAGGGCCGGTTCACCATCTCCCGCGACGATTCCAAGAACACGCTGTATCTGCAAAT |
| | GAACAGCCTGCGTGCCGAGGACACCGCGGTATATTACTGTGCGGAAAATCTGGTTAAGCTGT |
| | CGCGTACTGAGTGGATGTTTGACTACTGGGGTCAGGGAACCCTGGTCACCGTCTCGAGC |
| | (SEQ ID NO: 730) |
| ABT2-65- | GAGGTGCAGCTGTTGGAGTCTGGGGGAGGCTTGGTACAGCCTGGGGGGTCCCTGCGTCTCTC |
| 137 | CTGTGCAGCCTCCGGATTCACCTTTGAGGATTATCAGATGGGGTGGGTCCGCCAGGCTCCAG |
| | GGAAGGGTCTAGAGTGGGTCTCATCGATTTCGGCTATGGGTAATCGGACATACTACGCAGAC |
| | TCCGTGAAGGGCCGGTTTACCATCTCCCGCGACGATTCCAAGAACACGCTGTATCTGCAAAT |
| | GAACAGCCTGCGTGCCGAGGACACCGCGGTATATTACTGTGCGGAAAATCTGGTTCGGACGG |
| | CTAAGCGTAGGTGGATGTTTGACTACTGGGGTCAGGGAACCCTGGTCACCGTCTCGAGC |
| | (SEQ ID NO: 731) |
| ABT2-65- | GAGGTGCAGCTGTTGGAGTCTGGGGGAGGCTTGGTACAGCCTGGGGGGTCCCTGCGTCTCTC |
| 138 | CTGTGCAGCCTCCGGATTCACCTTTGAGGATTATCAGATGGGGTGGGTCCGCCAGGCTCCAG |
| | GGAAGGGTCTAGAGTGGGTCTCATCGATTTCGGCTATGGGTAATCGGACATACTACGCAGAC |
| | TCCGTGAAGGGCCGGTTCACCATCTCCCGCGACGATTCCAAGAACACGCTGTATCTGCAAAT |
| | GAACAGCCTGCGTGCCGAGGACACCGCGGTATATTACTGTGCGGAAAATCTGGTTCGGGTTA |
| | CGGCGCGGAAGTGGATGTTTGACTACTGGGGTCAGGGAACCCTGGTCACCGTCTCGAGC (SEQ |
| | ID NO: 732) |
| ABT2-65- | GAGGTGCAGCTGTTGGAGTCTGGGGGAGGCTTGGTACAGCCTGGGGGGTCCCTGCGTCTCTC |
| 139 | CTGTGCAGCCTCCGGATTCACCTTTGAGGATTATCAGATGGGGTGGGTCCGCCAGGCTCCAG |
| | GGAAGGGTCTAGAGTGGGTCTCATCGATTTCGGCTATGGGTAATCGGACATACTACGCAGAC |
| | TCCGTGAAGGGCCGGTTCACCATCTCCCGCGACGATTCCAAGAACACGCTGTATCTGCAAAT |
| | GAACAGCCTGCGTGCCGAGGACACCGCGGTATATTACTGTGCGCAAAATCTGGTTAGGGTGC |
| | GTGTGCGTCGGTGGATGTTTGACTACTGGGGTCAGGGAACCCTGGTCACCGTCTCGAGC |
| | (SEQ ID NO: 733) |
| ABT2-65- | GAGGTGCAGCTGTTGGAGTCTGGGGGAGGCTTGGTACAGCCTGGGGGGTCCCTGCGTCTCTC |
| 140 | CTGTGCAGCCTCCGGATTCACCTTTGAGGATTATCAGATGGGGTGGGTCCGCCAGGCTCCAG |
| | GGAAGGGTCTAGAGTGGGTCTCATCGATTTCGGCTATGGGTAATCGGACATACTACGCAGAC |
| | TCCGTGAAGGGCCGGTTCACCATCTCCCGCGACGATTCCAAGAACACGCTGTATCTGCAAAT |
| | GAACAGCCTGCGTGCCGAGGACACCGCGGTATATTACTGTGCGGAAAATCTGGTTAAGATTT |
| | CGAGGCGTCATTGGATGTTTGACTACTGGGGTCAGGGAACCCTGGTCACCGTCTCGAGC |
| | (SEQ ID NO: 734) |
| ABT2-65- | GAGGTGCAGCTGTTGGAGTCTGGGGGAGGCTTGGTACAGCCTGGGGGGTCCCTGCGTCTCTC |
| 141 | CTGTGCAGCCTCCGGATTCACCTTTGAGGATTATCAGATGGGGTGGGTCCGCCAGGCTCCAG |
| | GGAAGGGTCTAGAGTGGGTCTCATCGATTTCGGCTATGGGTAATCGGACATACTACGCAGAC |
| | TCCGTGAAGGGCCGGTTCACCATCTCCCGCGACGATTCCAAGAACACGCTGTATCTGCAAAT |
| | GAACAGCCTGCGTGCCGAGGACACCGCGGTATATTACTGTGCGGAAAATCTGGTTAGGATTA |
| | AGCAGACGAAGTGGATGTTTGACTACTGGGGTCAGGGAACCCTGGTCACCGTCTCGAGC |
| | (SEQ ID NO: 735) |
| ABT2-65- | GAGGTGCAGCTGTTGGAGTCTGGGGGAGGCTTGGTACAGCCTGGGGGGTCCCTGCGTCTCTC |
| 142 | CTGTGCAGCCTCCGGATTCACCTTTGAGGATTATCAGATGGGGTGGGTCCGCCAGGCTCCAG |
| | GGAAGGGTCTAGAGTGGGTCTCATCGATTTCGGCTATGGGTAATCGGACATACTACGCAGAC |
| | TCCGTGAAGGGCCGGTTCACCATCTCCCGCGACGATTCCAAGAACACGCTGTATCTGCAAAT |
| | GAACAGCCTGCGTGCCGAGGACACCGCGGTATATTACTGTGCGGAAAATCTGGTTAAGATTT |
| | CTGCGAGGGAGTGGATGTTTGACTACTGGGGTCAGGGAACCCTGGTCACCGTCTCGAGC |
| | (SEQ ID NO: 736) |
| ABT2-65- | GAGGTGCAGCTGTTGGAGTCTGGGGGAGGCTTGGTACAGCCTGGGGGGTCCCTGCGTCTCTC |
| 143 | CTGTGCAGCCTCCGGATTCACCTTTGAGGATTATCAGATGGGGTGGGTCCGCCAGGCTCCAG |
| | GGAAGGGTCTAGAGTGGGTCTCATCGATTTCGGCTATGGGTAATCGGACATACTACGCAGAC |
| | TCCGTGAAGGGCCGGTTCACCATCTCCCGCGACGATTCCAAGAACACGCTGTATCTGCAAAT |
| | GAACAGCCTGCGTGCCGAGGACACCGCGGTATATTACTGTGCGGAAAATCTGGTTCGTCTGC |
| | AGAGGGATAGGTGGATGTTTGACTACTGGGGTCAGGGAACCCTGGTCACCGTCTCGAGC |
| | (SEQ ID NO: 737) |
| ABT2-65- | GAGGTGCAGCTGTTGGAGTCTGGGGGAGGCTTGGTACAGCCTGGGGGGTCCCTGCGTCTCTC |
| 144 | CTGTGCAGCCTCCGGATTCACCTTTGAGGATTATCAGATGGGGTGGGTGCGCCAGGCTCCAG |
| | GGAAGGGTCTAGAGTGGGTCTCATCGATTTCGGCTATGGGTAATCGGACATACTACGCAGAC |
| | TCCGTGAAGGGCCGGTTCACCATCTCCCGCGACGATTCCAAGAACACGCTGTATCTGCAAAT |
| | GAACAGCCTGCGTGCCGAGGACACCGCGGTATATTACTGTGCGGAAAATCTGGTTCGTATTT |
| | CGAAGAAGCAGTGGATGTTTGACTACTGGGGTCAGGGAACCCTGGTCACCGTCTCGAGC |
| | (SEQ ID NO: 738) |
| ABT2-65- | GAGGTGCAGCTGTTGGAGTCTGGGGGAGGCTTGGTACAGCCTGGGGGGTCCCTGCGTCTCTC |
| 145 | CTGTGCAGCCTCCGGATTCACCTTTGAGGATTATCAGATGGGGTGGGTCCGCCAGGCTCCAG |
| | GGAAGGGTCTAGAGTGGGTCTCATCGATTTCGGCTATGGGTAATCGGACATACTACGCAGAC |
| | TCCGTGAAGGGCCGGTTCACCATCTCCCGCGACGATTCCAAGAACACGCTGTATCTGCAAAT |
| | GAACAGCCTGCGTGCCGAGGACACCGCGGTATATTACTGTGCGGAAAATCTGGTTAGGATTC |
| | AGAAGGTTAAGTGGATGTTTGACTACTGGGGTCAGGGAACCCTGGTCACCGTCTCGAGC |
| | (SEQ ID NO: 739) |
| ABT2-65- | GAGGTGCAGCTGTTGGAGTCTGGGGGAGGCTTGGTACAGCCTGGGGGGTCCCTGCGTCTCTC |
| 146 | CTGTGCAGCCTCCGGATTCACCTTTGAGGATTATCAGATGGGGTGGGTCCGCCAGGCTCCAG |
| | GGAAGGGTCTAGAGTGGGTCTCATCGATTTCGGCTATGGGTAATCGGACATACTACGCAGAC |
| | TCCGTGAAGGGCCGGTTCACCATCTCCCGCGACGATTCCAAGAACACGCTGTATCTGCAAAT |
| | GAACAGCCTGCGTGCCGAGGACACCGCGGTATATTACTGTGCGGAAAATCTGGTTAGGACTA |
| | TGAAGCGGAAGTGGATGTTTGACTACTGGGGTCAGGGAACCCTGGTCACCGTCTCGAGC |
| | (SEQ ID NO: 740) |
| ABT2-65- | GAGGTGCAGCTGTTGGAGTCTGGGGGTGGCTTGGTGCAGCCTGGGGGGTCCCTGCGTCTCTC |
| 147 | CTGTGCAGCCTCCGGATTCACCTTTGAGGATTATCAGATGGGGTGGGTCCGCCAGGCTCCAG |
| | GGAAGGGTCTAGAGTGGGTCTCATCGATTTCGGCTATGGGTAATCGGACATACTACGCAGAC |
| | TCCGTGAAGGGCCGGTTCACCATCTCCCGCGACGATTCCAAGAACACGCTGTATCTGCAAAT |
| | GAACAGCCTGCGTGCCGAGGACACCGCGGTATATTACTGTGCGGAAAATCTGGTTCGGCTTG |
| | GGCGGATTCGTTGGATGTTTGACTACTGGGGTCAGGGAACCCTGGTCACCGTCTCGAGC |
| | (SEQ ID NO: 741) |
| ABT2-65- | GAGGTGCAGCTGTTGGAGTCTGGGGGAGGCTTGGTACAGCCTGGGGGGTCCCTGCGTCTCTC |
| 148 | CTGTGCAGCCTCCGGATTCACCTTTGAGGATTATCAGATGGGGTGGGTCCGCCAGGCTCCAG |
| | GGAAGGGTCTAGAGTGGGTCTCATCGATTTCGGCTATGGGTAATCGGACATACTACGCAGAC |
| | TCCGTGAAGGGCCGGTTCACCATCTCCCGCGACGATTCCAAGAACACGCTGTATCTGCAAAT |
| | GAACAGCCTGCGTGCCGAGGACACCGCGGTATATTACTGTGCGCAAAATCTGGTTCGGCTTG |
| | GGTCGAAGAGGTGGATGTTTGACTACTGGGGTCAGGGAACCCTGGTCACCGTCTCGAGC |
| | (SEQ ID NO: 742) |
| ABT2-65- | GAGGTGCAGCTGTTGGAGTCTGGGGGAGGCTTGGTACAGCCTGGGGGGTCCCTGCGTCTCTC |
| 149 | CTGTGCAGCCTCCGGATTCACCTTTGAGGATTATCAGATGGGGTGGGTCCGCCAGGCTCCAG |
| | GAAAGGGTCTAGAGTGGGTCTCGTCGATTTCGGCTATGGGTAATCGGACATACTACGCAGAC |
| | TCCGTGAAGGGCCGGTTCACCATCTCCCGCGACGATTCCAAGAACACGCTGTATCTGCAAAT |
| | GAACAGCCTGCGTGCCGAGGACACCGCGGTATATTACTGTGCGGAAAATCTGGTTCGTGTTG |
| | ATAGGAGGCGGTGGATGTTTGACTACTGGGGTCAGGGAACCCTGGTCACCGTCTCGAGC |
| | (SEQ ID NO: 743) |
| ABT2-65- | GAGGTGCAGCTGTTGGAGTCTGGGGGAGGCTTGGTACAGCCTGGGGGGTCCCTGCGTCTCTC |
| 150 | CTGTGCAGCCTCCGGATTCACCTTTGAGGATTATCAGATGGGGTGGGTCCGCCAGGCTCCAG |
| | GGAAGGGTCTAGAGTGGGTCTCATCGATTTCGGCTATGGGTAATCGGACATACTACGCAGAC |
| | TCCGTGAAGGGCCGGTTCACCATCTCCCGCGACGATTCCAAGAACACGCTGTATCTGCAAAT |
| | GAACAGCCTGCGTGCCGAGGACACCGCGGTATATTACTGTGCGGAAAATCTGGTTCTGATTG |
| | CGCGTGGTAAGTGGATGTTTGACTACTGGGGTCAGGGAACCCTGGTCACCGTCTCGAGC |
| | (SEQ ID NO: 744) |
| ABT2-65- | GAGGTGCAGCTGTTGGAGTCTGGGGGAGGCTTGGTACAGCCTGGGGGGTCCCTGCGTCTCTC |
| 151 | CTGTGCAGCCTCCGGATTCACCTTTGAGGATTATCAGATGGGGTGGGTCCGCCAGGCTCCAG |
| | GGAAGGGTCTAGAGTGGGTCTCATCGATTTCGGCTATGGGTAATCGGACATACTACGCAGAC |
| | TCCGTGAAGGGCCGGTTCACCATCTCCCGCGACGATTCCAAGAACACGCTGTATCTGCAAAT |
| | GAACAGCCTGCGTGCCGAGGACACCGCGGTATATTACTGTGCGGAAAATCTGGTTCGTTGGA |
| | GGAAGCATGCGTGGATGTTTGACTACTGGGGTCAGGGAACCCTGGTCACCGTCTCGAGC |
| | (SEQ ID NO: 745) |
| ABT2-65- | GAGGTGCAGCTGTTGGAGTCTGGGGGAGGCTTGGTACAGCCTGGGGGGTCCCTGCGTCTCTC |
| 152 | CTGTGCAGCCTCCGGATTCACCTTTGAGGATTATCAGATGGGGTGGGTCCGCCAGGCTCCAG |
| | GGAAGGGTCTAGAGTGGGTCTCATCGATTTCGGCTATGGGTAATCGGACATACTACGCAGAC |
| | TCCGTGAAGGGCCGGTTCACCATCTCCCGCGACGATTCCAAGAACACGCTGTATCTGCAAAT |
| | GAACAGCCTGCGTGCCGAGGACACCGCGGTATATTACTGTGCGGAAAATCTGGTTCGTTGGA |
| | AGAGTTCGGCGTGGATGTTTGACTACTGGGGTCAGGGAACCCTGGTCACCGTCTCGAGC |
| | (SEQ ID NO: 746) |
| ABT2-65- | GAGGTGCAGCTGTTGGAGTCTGGGGGAGGCTTGGTACAGCCTGGGGGGTCCCTGCGTCTCTC |
| 154 | CTGTGCAGCCTCCGGATTCACCTTTGAGGATTATCAGATGGGGTGGGTCCGCCAGGCTCCAG |
| | GGAAGGGTCTAGAGTGGGTCTCATCGATTTCGGCTATGGGTAATCGGACACACTACGCAGAC |
| | TCCGTGAAGGGCCGGTTCACCATCTCCCGCGACGATTCCAAGAACACGCTGTATCTGCAAAT |
| | GAACAGCCTGCGTGCCGAGGACACCGCGGTATATTACTGTGCGCAAAATCTGGTTAGGATTC |
| | GTAGGACGAAGTGGATGTTTGACTACTGGGGTCAGGGAACCCTGGTCACCGTCTCGAGC |
| | (SEQ ID NO: 747) |
| ABT2-65- | GAGGTGCAGCTGTTGGAGTCTGGGGGAGGCTTGGTACAGCCTGGGGGGTCCCTGCGTCTCTC |
| 155 | CTGTGCAGCCTCCGGATTCACCTTTGAGGATTATCAGATGGGGTGGGTCCGCCAGGCTCCAG |
| | GGAAGGGTCTAGAGTGGGTCTCATCGATTTCGGCTATGGGTAATCGGACATACTACGCAGAC |
| | TCCGTGAAGGGCCGGTTCACCATCTCCCGCGACGATTCCAAGAACACGCTGTATCTGCAAAT |
| | GAACAGCCTGCGTGCCGAGGACACCGCGGTATATTACTGTGCGCAAAATCTGGTTTTGGTTC |
| | AGAGGAGGAAGTGGATGTTTGACTACTGGGGTCAGGGAACCCTGGTCACCGTCTCGAGC |
| | (SEQ ID NO: 748) |
| ABT2-65- | GAGGTGCAGCTGTTGGAGTCTGGGGGAGGCTTGGTACAGCCTGGGGGGTCCCTGCGTCTCTC |
| 156 | CTGTGCAGCCTCCGGATTCACCTTTGAGGATTATCAGATGGGGTGGGTCCGCCAGGCTCCAG |
| | GGAAGGGTCTAGAGTGGGTCTCATCGATTTCGGCTATGGGTAATCGGACATACTACGCAGAC |
| | TCCGTGAAGGGCCGGTTCACCATCTCCCGCGACGATTCCAAGAACACGCTGTATCTGCAAAT |
| | GAACAGCCTGCGTGCCGAGGACACCGCGGTATATTACTGTGCGCAAAATCTGGTTCGGATTG |
| | GGCGGAATAAGTGGATGTTTGACTACTGGGGTCAGGGAACCCTGGTCACCGTCTCGAGC |
| | (SEQ ID NO: 749) |
| ABT2-65- | GAGGTGCAGCTGTTGGAGTCTGGGGGAGGCTTGGTACAGCCTGGGGGGTCCCTGCGTCTCTC |
| 157 | CTGTGCAGCCTCCGGATTCACCTTTGAGGATTATCAGATGGGGTGGGTCCGCCAGGCTCCAG |
| | GGAAGGGTCTAGAGTGGGTCTCATCGATTTCGGCTATGGGTAATCGGACATACTACGCAGAC |
| | TCCGTGAAGGGCCGGTTCACCATCTCCCGCGACGATTCCAAGAACATGCTGTATCTGCAAAT |
| | GAACAGCCTGCGTGCCGAGGACACCGCGGTATATTACTGTGCGGAAAATCTGGTTCGGCTTA |
| | GTCTGCATCGGTGGATGTTTGACTACTGGGGTCAGGGAACCCTGGTCACCGTCTCGAGC |
| | (SEQ ID NO: 750) |
| ABT2-65- | GAGGTGCAGCTGTTGGAGTCTGGGGGAGGCTTGGTACAGCCTGGGGGGTCCCTGCGTCTCTC |
| 158 | CTGTGCAGCCTCCGGATTCACCTTTGAGGATTATCAGATGGGGTGGGTCCGCCAGGCTCCAG |
| | GGAAGGGTCTAGAGTGGGTCTCATCGATTTCGGCTATGGGTAATCGGACATACTACGCAGAC |
| | TCCGTGAAGGGCCGGTTCACCATCTCCCGCGACGATTCCAAGAACACGCTGTATCTGCAAAT |
| | GAACAGCCTGCGTGCCGAGGACACCGCGGTATATTACTGTGCGCAAAATCTGGTTAAGTGGA |
| | AGAGGGATTTTTGGATGTTTGACTACTGGGGTCAGGGAACCCTGGTCACCGTCTCGAGC |
| | (SEQ ID NO: 751) |
| ABT2-65- | GAGGTGCAGCTGTTGGAGTCTGGGGGAGGCTTGGTACAGCCTGGGGGGTCCCTGCGTCTCTC |
| 159 | CTGTGCAGCCTCCGGATTCACCTTTGAGGATTATCAGATGGGGTGGGTCCGCCAGGCTCCAG |
| | GGAAGGGTCTAGAGTGGGTCTCATCGATTTCGGCTATGGGTAATCGGACATACTACGCAGAC |
| | TCCGTGAAGGGCCGGTTCACCATCTCCCGCGACGATTCCAAGAACACGCTGTATCTGCAAAT |
| | GAACAGCCTGCGTGCCGAGGACACCGCGGTATATTACTGTGCGGAAAATCTGGTTAGGGTGA |
| | GTAAGGCGAGGTGGATGTTTGACTACTGGGGTCAGGGAACCCTGGTCACCGTCTCGAGC |
| | (SEQ ID NO: 752) |
| ABT2-65- | GAGGTGCAGCTGTTGGAGTCTGGGGGAGGCTTGGTACAGCCTGGGGGGTCCCTGCGTCTCTC |
| 160 | CTGTGTAGCCTCCGGATTCACCTTTGAGGATTATCAGATGGGGTGGGTCCGCCAGGCTCCAG |
| | GGAAGGGTCTAGAGTGGGTCTCATCGATTTCGGCTATGGGTCCCCGGACATACTACGCAGAC |
| | TCCGTGAAGGGCCGGTTCACCATCTCCCGCGACGATTCCAAGAACACGCTGTATCTGCAAAT |
| | GAACAGCCTGCGTGCCGAGGACACCGCGGTATATTACTGTGCGCAAAATCTGGTTAGGCTGG |
| | GGAGGTCTAGGTGGATGTTTGACTACTGGGGTCAGGGAACCCTGGTCACAGTCTCGAGC (SEQ |
| | ID NO: 753) |
| ABT2-65- | GAGGTGCAGCTGTTGGAGTCTGGGGGAGGCTTGGTACAGCCTGGGGGGTCCCTGCGTCTCTC |
| 163 | CTGTGTAGCCTCCGGATTCACCTTTGAGGATTATCAGATGGGGTGGGTCCGCCAGGCTCCAG |
| | GGAAGGGTCTAGAGTGGGTCTCATCGATTTCGGCTATGGGTGGGCGGACATACTACGCAGAC |
| | TCCGTGAAGGGCCGGTTCACCATCTCCCGCGACGATTCCAAGAACACGCTGTATCTGCAAAT |
| | GAACAGCCTGCGTGCCGAGGACACCGCGGTATATTACTGTGCGCAAAATCTGGTTAGGCTGG |
| | GGAGGTCTAGGTGGATGTTTGACTACTGGGGTCAGGGAACCCTGGTCACAGTCTCGAGC |
| | (SEQ ID NO: 754) |
| ABT2-65- | GAGGTGCAGCTGTTGGAGTCTGGGGGAGGCTTGGTACAGCCTGGGGGGTCCCTGCGTCTCTC |
| 166 | CTGTGCAGCCTCCGGATTCACCTTTGAGGATTATCAGATGGGGTGGGTCCGCCAGGCTCCAG |
| | GGAAGGGTCTAGAGTGGGTCTCATCGATTTCGGCTATGGGTGGACGGACATACTACGCAGAC |
| | TCCGTGAAGGGCCGGTTCACCATCTCCCGCGACAATTCCAAGAACACGCTGTATCTGCAAAT |
| | GAACAGCCTGCGTGCCGAGGACACCGCGGTATATTACTGTGCGCAAAATCTGGTTAGGCTGG |
| | GGAGGTCTAGGTGGATGTTTGACTACTGGGGTCAGGGAACCCTGGTCACAGTCTCGAGC |
| | (SEQ ID NO: 755) |
| ABT2-65- | GAGGTGCAGCTGTTGGAGTCTGGGGGAGGCTTGGTACAGCCTGGGGGGTCCCTGCGTCTCTC |
| 167 | CTGTGCAGCCTCCGGATTCACCTTTGAGGATTATCAGATGGGGTGGGTCCGCCAGGCTCCAG |
| | GGAAGGGTCTAGAGTGGGTCTCATCGATTTCGGCTATGGGTAATCGGACATACTACGCAGAC |
| | TCCGTGAAGGGCCGGTTCACCATCTCCCGCGACGATTCCAAGAACACGCTGTATCTGCAAAT |
| | GAACAGCCTGCGTGCCGAGGACACCGCGGTATATTACTGTGCGCAAAATCTGGTTCGGTGGA |
| | AGAAGAATGAGTGGATGTTTGACTACTGGGGTCAGGGAACCCTGGTCACCGTCTCGAGC |
| | (SEQ ID NO: 756) |
| ABT2-65- | GAGGTGCAGCTGTTGGAGTCTGGGGGAGGCTTGGTACAGCCTGGGGGGTCCCTGCGTCTCTC |
| 168 | CTGTGCAGCCTCCGGATTCACCTTTGAGGATTATCAGATGGGGTGGGTCCGCCAGGCTCCAG |
| | GGAAGGGTCTAGAGTGGGTCTCATCGATTTCGGCTATGGGTAATCGGACATACTACGCAGAC |
| | TCCGTGAAGGGCCGGTTCACCATCTCCCGCGACGATTCCAAGAACACGCTGTATCTGCAAAT |
| | GAACAGCCTGCGTGCCGAGGACACCGCGGTATATTACTGTGCGCAAAATCTGGTTAGGTGGA |
| | AGTTGGAGTCTTGGATGTTTGACTACTGGGGTCAGGGAACCCTGGTCACCGTCTCGAGC |
| | (SEQ ID NO: 757) |
| ABT2-65- | GAGGTGCAGCTGTTGGAGTCTGGGGGAGGCTTGGTACAGCCTGGGGGGTCCCTGCGTCTCTC |
| 169 | CTGTGCAGCCTCCGGATTCACCTTTGAGGATTATCAGATGGGGTGGGTCCGCCAGGCTCCAG |
| | GGAAGGGTCTAGAGTGGGTCTCATCGATTTCGGCTATGGGTAATCGGACATACTACGCAGAC |
| | TCCGTGAAGGGCCGGTTCACCATCTCCCGCGACGATTCCAAGAACACGCTGTATCTGCAAAT |
| | GAACAGCCTGCGTGCCGAGGACACCGCGGTATATTACTGTGCGGAAAATCTGGTTAATTGGC |
| | GGCGTGGGTCTTGGATGTTTGACTACTGGGGTCAGGGAACCCTGGTCACCGTCTCGAGC |
| | (SEQ ID NO: 758) |
| ABT2-65- | GAGGTGCAGCTGTTGGAGTCTGGGGGAGGCTTGGTACAGCCTGGGGGGTCCCTGCGTCTCTC |
| 170 | CTGTGCAGCCTCCGGATTCACCTTTGAGGATTATCAGATGGGGTGGGTCCGCCAGGCTCCAG |
| | GGAAGGGTCTAGAGTGGGTCTCATCGATTTCGGCTATGGGTAATCGGACATACTACGCAGAC |
| | TCCGTGAAGGGCCGGTTCACCATCTCCCGCGACGATTCCAAGAACACGCTGTATCTGCAAAT |
| | GAACAGCCTGCGTGCCGAGGACACCGCGGTATATTACTGTGCGGAAAATCTGGTTCGGGTTC |
| | TTCTTAATAAGTGGATGTTTGACTACTGGGGTCAGGGAACCCTGGTCACCGTCTCGAGC |
| | (SEQ ID NO: 759) |
| ABT2-65- | GAGGTGCAGCTGTTGGAGTCTGGGGGAGGCTTGGTACAGCCTGGGGGGTCCCTGCGTCTCTC |
| 171 | CTGTGCAGCCTCCGGATTCACCTTTGAGGATTATCAGATGGGGTGGGTCCGCCAGGCTCCAG |
| | GGAAGGGTCTAGAGTGGGTCTCATCGATTTCGGCTATGGGTAATCGGACATACTACGCAGAC |
| | TCCGTGAAGGGCCGGTTCACCATCTCCCGCGACGATTCCAAGAACACGCTGTATCTGCAAAT |
| | GAACAGCCTGCGTGCCGAGGACACCGCGGTATATTACTGTGCGCAAAATCTGGTTCGGTTGA |
| | ATAGGTCGCAGTGGATGTTTGACTACTGGGGTCAGGGAACCCTGGTCACCGTCTCGAGC |
| | (SEQ ID NO: 760) |
| ABT2-65- | GAGGTGCAGCTGTTGGAGTCTGGGGGAGGCTTGGTACAGCCTGGGGGGTCCCTGCGTCTCTC |
| 172 | CTGTGCAGCCTCCGGATTCACCTTTGAGGATTATCAGATGGGGTGGGTCCGCCAGGCTCCAG |
| | GGAAGGGTCTAGAGTGGGTCTCATCGATTTCGGCTATGGGTAATCGGACATACTACGCAGAC |
| | TCCGTGAAGGGCCGGTTCACCATCTCCCGCGACGATTCCAAGAACACGCTGTATCTGCAAAT |
| | GAACAGCCTGCGTGCCGAGGACACCGCGGTATATTACTGTGCGGAAAATCTGGTTCGGTGGA |
| | AGAAGGGTTCTTGGATGTTTGACTACTGGGGTCAGGGAACCCTGGTCACCGTCTCGAGC |
| | (SEQ ID NO: 761) |
| ABT2-65- | GAGGTGCAGCTGTTGGAGTCTGGGGGAGGCTTGGTACAGCCTGGGGGGTCCCTGCGTCTCTC |
| 173 | CTGTGCAGCCTCCGGATTCACCTTTGAGGATTATCAGATGGGGTGGGTCCGCCAGGCTCCAG |
| | GGAAGGGTCTAGAGTGGGTCTCATCGATTTCGGCTATGGGTAATCGGACATACTACGCAGAC |
| | TCCGTGAAGGGCCGGTTCACCATCTCCCGCGACGATTCCAAGAACACGCTGTATCTGCAAAT |
| | GAACAGCCTGCGTGCCGAGGACACCGCGGTATATTACTGTGCGCAAAATCTGGTTAGGTTTC |
| | GGGCGAAGGAGTGGATGTTTGACTACTGGGGTCAGGGAACCCTGGTCACCGTCTCGAGC |
| | (SEQ ID NO: 762) |
| ABT2-65- | GAGGTGCAGCTGTTGGAGTCTGGGGGAGGCTTGGTACAGCCTGGGGGGTCCCTGCGTCTCTC |
| 174 | CTGTGCAGCCTCCGGATTCACCTTTGAGGATTATCAGATGGGGTGGGTCCGCCAGGCTCCAG |
| | GGAAGGGTCTAGAGTGGGTCTCATCGATTTCGGCTATGGGTAATCGGACATACTACGCAGAC |
| | TCCGTGAAGGGCCGGTTCACCATCTCCCGCGACGATTCCAAGAACACGCTGTATCTGCAAAT |
| | GAACAGCCTGCGTGCCGAGGACACCGCGGTATATTACTGTGCGCAAAATCTGGTTAGGTTTA |
| | AGAAGACGCAGTGGATGTTTGACTACTGGGGTCAGGGAACCCTGGTCACCGTCTCGAGC |
| | (SEQ ID NO: 763) |
| ABT2-65- | GAGGTGCAGCTGTTGGAGTCTGGGGGAGGCTTGGTACAGCCTGGGGGGTCCCTGCGTCTCTC |
| 175 | CTGTGCAGCCTCCGGATTCACCTTTGAGGATTATCAGATGGGGTGGGTCCGCCAGGCTCCAG |
| | GGAAGGGTCTAGAGTGGGTCTCATCGATTTCGGCTATGGGTAATCGGACATACTACGCAGAC |
| | TCCGTGAAGGGCCGGTTCACCATCTCCCGCGACGATTCCAAGAACACGCTGTATCTGCAAAT |
| | GAACAGCCTGCGTGCCGAGGACACCGCGGTATATTACTGTGCGGAAAATCTGGTTAGGATTG |
| | CGGGGGATCGGTGGATGTTTGACTACTGGGGTCAGGGAACCCTGGTCACCGTCTCGAGC |
| | (SEQ ID NO: 764) |
| ABT2-65- | GAGGTGCAGCTGTTGGAGTCTGGGGGAGGCTTGGTACAGCCTGGGGGGTCCCTGCGTCTCTC |
| 176 | CTGTGCAGCCTCCGGATTCACCTTTGAGGATTATCAGATGGGGTGGGTCCGCCAGGCTCCAG |
| | GGAAGGGTCTAGAGTGGGTCTCATCGATTTCGGCTATGGGTAGTCGGACATACTACGCAGAC |
| | TCCGTGAAGGGCCGGTTCACCATCTCCCGCGACGATTCCAAGAACACGCTGTATCTGCAAAT |
| | GAACAGCCTGCGTGCCGAGGACACCGCGGTATATTACTGTGCGGAAAATCTGGTTAAGGTGG |
| | CGCGGGGTCGTTGGATGTTTGACTACTGGGGTCAGGGAACCCTGGTCACCGTCTCGAGC |
| | (SEQ ID NO: 765) |
| ABT2-65- | GAGGTGCAGCTGTTGGAGTCTGGGGGAGGCTTGGTACAGCCTGGGGGGTCCCTGCGTCTCTC |
| 177 | CTGTGCAGCCTCCGGATTCACCTTTGAGGATTATCAGATGGGGTGGGTCCGCCAGGCTCCAG |
| | GGAAGGGTCTAGAGTGGGTCTCATCGATTTCGGCTATGGGTAATCGGACATACTACGCAGAC |
| | TCCGTGAAGGGCCGGTTCACCATCTCCCGCGACGATTCCAAGAACACGCTGTATCTGCAAAT |
| | GAACAGCTTGCGTGCCGAGGACACCGCGGTATATTACTGTGCGCAAAATCTGGTTAGGTTTA |
| | AGGTGCTGCAGTGGATGTTTGACTACTGGGGTCAGGGAACCCTGGTCACCGTCTCGAGC |
| | (SEQ ID NO: 766) |
| ABT2-65- | GAGGTGCAGCTGTTGGAGTCTGGGGGAGGCTTGGTACAGCCTGGGGGGTCCCTGCGTCTCTC |
| 500 | CTGTGTAGCCTCCGGATTCACCTTTGAGGATTATCAGATGGGGTGGGTCCGCCAGGCTCCAG |
| | GGAAGGGTCTAGAGTGGGTCTCATCGATTTCGGCTATGGGTAATCGGACATACTACGCAGAC |
| | TCCGTGAAGGGCCGGTTCACCATCTCCCGCGACGGTTCCAAGAACACGCTGTATCTGCAAAT |
| | GAACAGCCTGCGTGCCGAGGACACCGCGGTATATTACTGTGCGCAAAATCTGGTTAGGCTGG |
| | GGGGGTCTAGGTGGATGTTTGACTACTGGGGTCAGGGAACCCTGGTCACCGTCTTGAGC |
| | (SEQ ID NO: 767) |
| ABT2-65- | GAGGTGCAGCTGTTGGAGTCTGGGGGAGGCTTGGTACAGCCTGGGGGGTCCCTGCGTCTCTC |
| 501 | CTGTGTAGCCTCCGGATTCGCCTTTGAGGATTATCAGATGGGGTGGGTCCGCCAGGCTCCAG |
| | GGAAGGGTCTAGAGTGGGTCTCATCGATTTCGGCTATGGGTAATCGGACATACTACGCAGAC |
| | TCCGTGAGGGGCCGGTTCACCATCTCCCGCGACGGTTCCAAGAACACGCTGTATCTGCAAAT |
| | GAACAGCCTGCGTGCCGAGGACACCGCGGCATATTACTGTGCGCAAAATCTGGTTAGGCTGG |
| | GGAGGTCTAGGTGGGTGTTTGACTACTGGGGTCAGGGAACCCTGGTCACCGTCTCGAGC |
| | (SEQ ID NO: 768) |
| ABT2-65- | GAGGTGCAGCTGTTGGAGTCTGGGGGAGGCTTGGTACAGCCTGGGGGGTCCCTGCGTCTCTC |
| 502 | CTGTGTAGCCTCCGGATTCACCTTTGAGGATTATCAGATGGGGTGGGTCCGCCAGGCTCCAG |
| | GGAAGGGTCTAGAGTGGGTCTCATCGGTTTCGGCTATGGGTAATCGGACATACTACGCAGAC |
| | TCCGTGAAGGGCCGGTTCACCATTTCCCGCGACGGTTCCAAGAACACGCTGTATCTGCAAAT |
| | GAACAGCCTGCGTGCCGAGGACACCGCGGTATATTACTGTGCGCAAAATCTGGTTAGGCTGG |
| | GGAGGTCTAGGTGGATGTTTGACTACTGGGGTCAGGGAACCCTGGTCACCGTCTCGAGC |
| | (SEQ ID NO: 769) |
| ABT2-65- | GAGGTGCAGCTGTTGGAGTCTGGGGGAGGCTTGGTACAGCCTGGGGGGTCCCTGCGTCTCTC |
| 503 | CTGTGTAGCCTCCGGATTCACCTTTGAGGATTATCAGATGGGGTGGGTCCGCCAGGCTCCAG |
| | GGAAGGGTCTAGAGCGGGTCTCATCGGTTTCGGCTATGGGTAATCGGACACACTACGCAGAC |
| | TCCGTGAAGGGCCGGTTCACCATCTCCCGCGACGATTCCAAGAACACGCTGTATCTGCAAAT |
| | GAACAGCCTGCGTGCCGGGGACACCGCGGTATATTACTGTGCGCAAAATCTGGTTAGGCTGG |
| | GGAGGTCTAGGTGGATGTTTGACTACTGGGGTCAGGGAACCCTGGTCACCGTCTCGAGC |
| | (SEQ ID NO: 770) |
| ABT2-65- | GAGGTGCAGCTGTTGGAGTCTGGGGGAGGCTTGGTACAGCCTGGGGGGTCCCTGCGTCTCTC |
| 504 | CTGTGTAGCCTCCGGATTCACCTTTGAGGATTATCAGATGGGGTGGGTCCGCCAGGCTCCAG |
| | GGAAGGGTCTAGAGCGGGTCTCATCGGTTTCGGCTATGGGTAATCGGACACACTACGCAGAC |
| | TCCGTGAAGGGCCGGTTCACCATCTCCCGCGACGATTCCAAGAACACGCTGTATCTGCAAAT |
| | GAACAGCCTGCGTGCCGGGGACACCGCGGTATATTACTGTGCGCAAAATCTGGTTAGGCTGG |
| | GGAGGTCTAGGTGGATGTTTGACTACTGGGGTCAGGGAACCCTGGTCACCGTCTCGAGC |
| | (SEQ ID NO: 771) |
| ABT2-65- | GAGGTGCAGCTGTTGGAGTCTGGGGGAGGCTTGGTACAGCCTGGGGGGTCCCTGCGTCTCTC |
| 505 | CTGTGTAGCCTCCGGATTCACCTTTGAGGATTATCGGATGGGGTGGGTCCGCCAGGCTCCAG |
| | GGAAGGGTCTAGAGTGGGTCTCATCGGTTTCGGCTATGGGTAATCGGACATACTACGCAGAC |
| | TCCGTGAAGGGCCGGTTCACCATCTCCCGCGACGGTTCCAAGAACACGCTGTATCTGCAAAT |
| | GAACAGCCTGCGTGCCGAGGACACCGCGGTATATTACTGTGCGCAAAATCTGGTTAAGCTGG |
| | GGAGGTCTAGGTGGATGTTTGACTACTGGGGTCAGGGAACCCTGGTCACCGTCTCGAGC |
| | (SEQ ID NO: 772) |
| ABT2-65- | GAGGTGCAGCTGTTGGAGTCTGGGGGAGGCTTGGTACGGCCTGGGGGGTCCCTGCGTCTCTC |
| 506 | CTGTGTAGCCTCCGGATTCACCTTTGAGGATTATCAGATGGGGTGGGTCCGCCAGGCTCCAG |
| | GGAAGGGTCTAGAGTGGGTCTCATCGATTTCGGCTATGGGTAATCGGACATACTACGCAGAC |
| | TCCGTGAAGGGCCGGTTCACCATCTCCCGCGACGATTCCAAGAACACGCTGTATCTGCAAAT |
| | GAACAGCCTGCGTGCCGAGGACACCGCGGTATATTGCTGTGCGCAAAATCTGGTTAGGCTGG |
| | GGAGGTCTAGGTGGATGTTTGACTACTGGGGTCAGGGAACCCTGGTCACCGTCTCAAGC |
| | (SEQ ID NO: 773) |
| ABT2-65- | GAGGTGCAGCTGTTGGAGTCTGGGGGAGGCTTGGTACAGCCTGGGGGGTCCCTGCGTCTCCC |
| 507 | CTGTGTAGCCTCCGGATTCACCTTTGAGGATTGTCAGATGGGGTGGGTCCGCCAGGCTCCAG |
| | GGAAGGGTCTAGAGTGGGTCTCATCGATTTCGGCTATGGGTAATCGGACATACTACGCAGAC |
| | TCCGTGAAGGGCCGGTTCACCATTTCCCGCGACAATTCCAAGAACACGCTGTATCTGCAAAT |
| | GAACAGCCTGCGTGCCGAGGACACCGCGGTATATTACTGTGCGCAAAATCTGGTTAGGCTGG |
| | GGAGGTCTAGGTGGATGTTTGACTACTGGGGTCAGGGAACCCTGGTCACCGTCTCGAGC |
| | (SEQ ID NO: 774) |
| ABT2-65- | GAGGTGCAGCTGTTGGAGTCTGGGGGAGGCTTGGTACAGCCTGGGGGGTCCCTGCGTCTCTC |
| 508 | CTGTGTAGCCTCCGGATTCCCCTTTGAGGATTATCAGATGGGGTGGGTCCGCCAGGCTCCAG |
| | GGGAGGGTCTAGAGTGGGCCTCATCGATTTCGGCTATGGGTAATCGGACATACTACGCAGAC |
| | TCCGTGAAGGGCCGGTTCACCATCTCCCGCAACGATTCCAAGAACACGCTGTATCTGCAAAT |
| | GAACAGCCTGCGTGCCGAGGACACCGCGGTATATTACTGTGCGCAAAATCTGGTTAGGCTGG |
| | GGGGGTCTAGGTGGATGTTTGACTACTGGGGTCAGGGAACCCTGGTCACCGTCTCGAGC |
| | (SEQ ID NO: 775) |
| ABT2-65- | GAGGTGCAGCTGTTGGAGTCTGGGGGAGGCTTGGTACAGCCTGGGGGGTCCCTGCGTCTCTC |
| 509 | CTGTGTAGCCTCCGGATTCACCTTTGAGGATTATCAGATGGGGTGGGTCCGCCAGGCTCCAG |
| | GGAAGGGTCTAGAGTGGGTCTCATCGATTTCGGCTATGGGTAATCGGACATACTACGCAGAC |
| | TCCGTGAAGGGCCGGTTCACCATCTCCCGCGACGATTCCAAGAACACGCTGTATCTGCAAAT |
| | GAACAGCCTGCGTGCCGAGGACGCCGCGGTATATTACTGTGCGCAAAATCTGGTTAGGCTGG |
| | GGAGGTCTAGGTGGATGTTTGACTACTGGGGTCAGGGAACCCTGGTCACCGTCTCTAGC |
| | (SEQ ID NO: 776) |
| ABT2-65- | GAGGTGCAGCTGTTGGAGTCTGGGGGAGGCTTGGTACAGCCTGGGGGGTCCCTGCGTCTCTC |
| 510 | CTGTGTAGCCTCCGGATTCACCTTTGAGGATTATCAGATGGGGTGGGTCCGCCAGGCTCCAG |
| | GGAAGGGTCTAGAGTGGGTCTCATCGATTTCGGCTATGGGTAATCGGACATACTACGCAGAC |
| | TCCGTGAAGGGCCGGTTCACCATCTCCCGCGACGATTCCGAGAACACGCTGTATCTGCAAAT |
| | GAACAGCCTGCGTGCCGAGGACACCGCGGTATATTACTGTGCGCAAAATCTGGTTAGGCTGG |
| | GGAGGTCTAGGTGGATGTTTGACTACTGGGGTCAGGGAACCCTGGTCACCGTCTCGAGC |
| | (SEQ ID NO: 777) |
| ABT2-65- | GAGGTGCAGCTGTTGGAGTCTGGGGGAGGCTTGGTACAGCCTGGGGGGTCCCTGCGTCCCTC |
| 511 | CTGTGTAGCCTCCGGATTCACCTTTGGGGATTATCAGATGGGGTGGGTCCGCCAGGCTCCAG |
| | GGAAGGGTCTAGAGTGGGTCTCATCGATTTCGGCTATGGGTAGTCGGACATACTACGCAGAC |
| | TCCGTGAAGGGCCGGTTCACCATCTCCCGCGACGATTCCAAGAACACGCTGTATCTGCAAAT |
| | GAACAGCCTGCGTGCCGAGGACACCGCGGTATATTACTGTGCGCAAAATCTGGTTAGGCTGG |
| | GGAGGTCTAGGTGGATGTTTGACCACTGGGGTCAGGGAACCCTGGTCACCGTCTCGAGC |
| | (SEQ ID NO: 778) |
| ABT2-65- | GAGGTGCAGCTGTTGGAGTCTGGGGGAGGCTTGGTACAGCCTGGGGGGTCCCTGCGTCTCTC |
| 512 | CTGTGTAGCCTCCGGATTCACCTTTGAGGATTATCAGATGGGGTGGGTCCACCAGGCTCCAG |
| | GGAAGGGTCTAGAGTGGGTCTCATCGATTTCGGCTATGGGTAATCGGACATACTACGCAGAC |
| | TCCGTGAAGGGCCGGTTCACCATCTCCCGCGACGATTCCAAGAACACGCTGTATCTGCAAAT |
| | GAACAGCCTGCGTGCCGAGGACACCGCGGTATATTACTGTGCGCAAAATCTGGTTAGGCTGG |
| | GGAGGTCTAGGTGGATGTTTGACTACTGGGGTCAGGGAACCCTGGTCACCGTCTCGAGC |
| | (SEQ ID NO: 779) |
| ABT2-65- | GAGGTGCAGCTGTTGGAGTCTGGGGGAGGCTTGGTACAGCCTGGGGGGTCCCTGCGTCTCTC |
| 513 | CTGTGTAGCCTCCGGATTCACCTTTGAGGATTATCAGATGGGGTGGGTCCGCCAGGCTCCAG |
| | GGAAGGGTCTAGAGTGGGTCTCATCGATTTCGGCTGTGGGTAATCGGACATACTACGCAGAC |
| | TCCGTGAAGGGCCGGTTCACCATCTCCCGCGACGATTCCAAGAACACGCTGTATCTGCAAAT |
| | GAACAGCCTGCGTGCCGAGGACACCGCGGTATATTACTGTGCGCAGAATCTGGTTAGGCTGG |
| | GGAGGTCTAGGCGGATGTTTGACTACTGGGGTCAGGGAACCCTGGTCACCGTCTCGAGC |
| | (SEQ ID NO: 780) |
| ABT2-65- | GAGGTGCAGCTGTTGGAGTCTGGGGGGGGCTTGGTACAGCCTGGGGGGTCCCTGCGTCTCTC |
| 514 | CTGTGTAGCCTCCGGATTCACCTTTGAGGATTATCAAATGGGGTGGGCCCGCCAGGCTCCAG |
| | GGAAGGGTCTAGAGTGGGTCTCATCGATTTCGGCTATGGGTAATCGGACATACTACGCAGAC |
| | TCCGTGAAGGGCCGGTTCACCATCTCCCGCGACGATTCCAAGAACACGCTGTATCTGCAAAT |
| | GAACAGCCTGCGTGCCGAGGACACCGCGGTATATTACTGTGCGCAAAATCTGGTTAGGCTGG |
| | GGAGGTCTAGGTGGATGTTTGACTACTGGGGTCAGGGAACCCTGGTCACCGTCTCGAGC |
| | (SEQ ID NO: 781) |
| ABT2-65- | GAGTGCAGCTGTTGGAGGTCTGGGGGAGGCTTGGTACAGCCTGGGGGGTCCCTGCGTCTCTC |
| 515 | CTGTGTAGCCTCCGGATTCACCTTTGAGGATTATCAGATGGGGTGGGTCCGCCAGGCTCCAG |
| | GGAAGGGTCTAGAGTGGGTCTCATCGATTTCGGCTATGGGTAATCGGACATACTACGCAGAC |
| | TCCGTGAAGGGCCGGTTCACCATCTCCCGCGACGATTCCAAGAACACGCTGTATCTGCAAAT |
| | GAACAGCCTGCGTGCCGAGGACACCGCGGTATATTACTGTGCGCAAAATCTGGTTAGGCTGG |
| | GGAGGTCTAGGTGGATGTTTGACTACTGGGGTCAGGGAACCCTGGTCACCGTCTCGAGC |
| | (SEQ ID NO: 782) |
| ABT2-66 | GAGGTGCAGCTGTTGGAGTCTGGGGGAGGCTTGGTACAGCCTGGGGGGTCCCTGCGTCTCTC |
| | CTGTGCAGCCTCCGGATTCACCTTTTCTCATTATACTATGGCGTGGGTCCGCCAGGCTCCAG |
| | GGAAGGGTCTAGAGTGGGTCTCAACTATTGGTTCTTCTGGTAATAGTACATACTACGCAGAC |
| | TCCGTGAAGGGCCGGTTCACCATCTCCCGCGACAATTCCAAGAACACGCTGTATCTGCAAAT |
| | GAACAGCCTGCGTGCCGAGGACACCGCGGTATATTACTGTGCGCAAATGCGGGGGCCGTATT |
| | ATACTTTTGACTACCGGGGTCAGGGAACCCTGGTCACCGTCTCGAGC (SEQ ID NO: |
| | 783) |
| ABT2-69 | GAGGTGCAGCTGTTGGAGTCTGGGGGAGGCTTGGTACAGCCTGGGGGGTCCCTGCGTCTCTC |
| | CTGTGCAGCCTCCGGATTCACCTTTACGGGTTATGATATGGCTTGGGTCCGCCAGGCTCCAG |
| | GGAAGGGTCTAGAGTGGGTCTCAGTGATTTATGCTTATGGTGAGTCTACATACTACGCAGAC |
| | TCCGTGAAGGGCCGGTTCACCATCTCCCGCGACAATTCCAAGAACACGCTGTATCTGCAAAT |
| | GAACAGCCTGCGTGCCGAGGATACCGCGGTATATTACTGTGCGAAAGTGTATTCGAATCAGT |
| | TTGACTACTGGGGTCAGGGAACCCTGGTCACCGTCTCGAGC (SEQ ID NO: 784) |
| ABT2-70 | GAGGTGCAGCTGTTGGAGTCTGGGGGAGGCTTGGTACAGCCTGGGGGGTCCCTGCGTCTCTC |
| | CTGTGCAGCCTCGGGATTCACCTTTAGGGCTTATGATATGGGGTGGGTCCGCCAGGCTCCAG |
| | GGAGGGGTCTAGAGTGGGTCTCAGTTATTTATGCGTGGGGTACTAGTACATACTACGCAGAC |
| | TCCGTGAAGGGCCGGTTCACCATCTCCCGCGACAATTCCAAGAACACGCTGTATCTGCAAAT |
| | GAACAGCCTGCGTGCCGAGGACACCGCGGTATATTACTGTGCGAAAACGTCTCCTAATGCGA |
| | GTTTTGACTACTGGGGTCAGGGAACCCTGGTCACCGTCTCGAGC (SEQ ID NO: 785) |
| ABT2-71 | GAGGTGCAGCTGTTGGAGTCTGGGGGAGGCTTGGTACAGCCTGGGGGGTCCCTGCGTCTCTC |
| | CTGTGCAGCCTCCGGATTCACCTTTAGGGCTTATGATATGGGGTGGGTCCGCCAGGCTCCAG |
| | GGAAGGGTCTAGAGTGGGTCTCAGTTATTTATGCGTGGGGTACTAGTACATACTACGCAGAC |
| | TCCGTGAAGGGCCGGTTCACCATCTCCCGCGACAATTCCAAGAACACGCTGTATCTGCAAAT |
| | GAACAGCCTGCGTGCCGAGGACACCGCGGTATATTACTGTGCGAAAAGGGGTCGTCAGTCGT |
| | TTGACTACTGGGGTCAGGGAACCCTGGTCACCGTCTCGAGC (SEQ ID NO: 786) |
| ABT2-72 | GAGGTGCAGCTGTTGGAGTCTGGGGGAGGCTTGGTACAGCCTGGGGGGTCCCTGCGTCTCTC |
| | CTGTGCAGCCTCCGGATTCACCTTTAGGGCTTATGATATGGGGTGGGTCCGCCAGGCTCCAG |
| | GGAAGGGTCTAGAGTGGGTCTCAGTTATTTATGCGTGGGGTACTAGTACATACTACGCAGAC |
| | TCCGTGAAGGGCCGGTTCACCATCTCCCGCGACAATTCCAAGAACACGCTGTATCTGCAAAT |
| | GAACAGCCTGCGTGCCGAGGACACCGCGGTATATTACTGTGCGAAAACTTCTTCTGATGGGT |
| | TTGACTACTGGGGTCAGGGAACCCTGGTCACCGTCTCGAGC (SEQ ID NO: 787) |
| ABT2-73 | GAGGTGCAGCTGTTGGAGTCTGGGGGAGGCTTGGTACAGCCTGGGGGGTCCCTGCGTCTCTC |
| | CTGTGCAGCCTCCGGATTCACCTTTAGGGCTTATGATATGGGGTGGGTCCGCCAGGCTCCAG |
| | GGAAGGGTCTAGAGTGGGTCTCAGTTATTTATGCGTGGGGTACTAGTACATACTACGCAGAC |
| | TCCGTGAAGGGCCGGTTCACCATCTCCCGCGACAATTCCAAGAACACGCTGTATCTGCAAAT |
| | GAACAGCCTGCGTGCCGAGGACACCGCGGTTTATTACTGTGCGAAATTTTCTCCGCTTAGGG |
| | CTCCTGTGTTTGACTACTGGGGTCAGGGAACCCTGGTCACCGTCTCGAGC (SEQ ID NO: |
| | 788) |
| ABT2-74 | GAGGTGCAGCTGTTGGAGTCTGGGGGAGGCTTGGTACAGCCTGGGGGGTCCCTGCGTCTCTC |
| | CTGTGCAGCCTCCGGATTCACCTTTGATCTGTATGATATGCATTGGGTCCGCCAGGCTCCAG |
| | GGAAGGGTCTAGAGTGGGTCTCAACGATTTATGCTTATGGTTATGCGACATACTACGCAGAC |
| | TCCGTGAAGGGCCGGTTCACCATCTCCCGCGACAATTCCAAGAACACGCTGTATCTGCAAAT |
| | GAACAGCCTGCGTGCCGAGGATACCGCGGTATATTACTGTGCGAAAAAGCATGGTATGTATG |
| | ATCATTTTGACTACTGGGGTCAGGGAACCCTGGTCACCGTCTCGAGC (SEQ ID NO: |
| | 789) |
| ABT2-75 | GAGGTGCAGCTGTTGGAGTCTGGGGGAGGCTTGGTACAGCCTGGGGGGTCCCTGCGTCTCTC |
| | CTGTGCAGCCTCCGGATTCACCTTTGGGCAGTATCCGATGGCGTGGGTCCGCCAGGCTCCAG |
| | GGAAGGGTCTAGAGTGGGTCTCAACTATTTCTCCGAAGGGTGATCGTACATACTACGCAGAC |
| | TCCGTGAAGGGCCGGTTCACCATCTCCCGCGACAATTCCAAGAACACGCTGTATCTGCAAAT |
| | GAACAGCCTGCGTGCCGAGGACACCGCGGTATATTACTGTGCGAAAGCGATGTATTCGTATC |
| | AGTATAAGGAGAAGGGTTTTGACTACTGGGGTCAGGGAACCCTGGTCACCGTCTCGAGC |
| | (SEQ ID NO: 790) |
| ABT2-99 | GAGGTGCAGCTGTTGGAGTCTGGGGGAGGCTTGGTACAGCCTGGGGGGTCCCTGCGTCTCTC |
| | CTGTACAGCCTCCGGATTCACCTTTCGTGATTATGATATGGGGTGGGTCCGCCAGGCTCCAG |
| | GGAAGGGTCTAGAGTGGGTCTCAGTTATTTATGCGTGGGGTACTAGTACATACTACGCAGAC |
| | TCCGTGAAGGGCCGGTTCACCATCTCCCGCGACAATTCCAAGAACACGCTGTATCTGCAAAT |
| | GAACAGCCTGCGTGCCGAGGATACCGCGGTATATTACTGTGCGAAAACTTCGTCTGTTAATT |
| | TTGACTACTGGGGTCAGGGAACCCTGGTCACCGTCTCGAGC (SEQ ID NO: 791) |
| ABT2-101 | GAGGTGCAGCTGTTGGAGTCTGGGGGAGGCTTGGTACAGCCTGGGGGGTCCCTGCGTCTCTC |
| | CTGTGCAGCCTCCGGATTCACCTTTAGGGCTTATGATATGGGGTGGGTCCGCCAGGCTCCAG |
| | GGAAGGGTCTAGAGTGGGTCTCAGTTATTTATGCGTGGGGTACTAGTACATACTACGCAGAC |
| | TCCGTGAAGGGCCGGTTCACCATCTCCCGCGACAATTCCAAGAACACGCTGTATCTGCAAAT |
| | GAACAGCCTGCGTGCCGAGGACACCGCGGTATATTACTGTGTGAAACGGGGGGAGGGTAAGT |
| | TTGACTACTGGGGTCAGGGAACCCTGGTCACCGTCTCGAGC (SEQ ID NO: 792) |
| ABT2-104 | GAGGTGCAGCTGTTGGAGTCTGGGGGAGGCTTGGTACAGCCTGGAGGGTCCCTGCGTCTCTC |
| | CTGTGCAGCCTCCGGATTCACCTTTAGGGCGTATCGGATGGGTTGGGTCCGCCAGGCTCCAG |
| | GGAAGGGTCTAGAGTGGGTCTCATGGATTTGGCCTAATGGTTCTCATGCATACTACGCAGAC |
| | TCCGTGAAGGGCCGGTTCACCATCTCCCGCGACAATTCCAAGAACACGCTGTATCTGCAAAT |
| | GAACAGCCTGCGTGCCGAGGACACCGCGGTATATTACTGTGCGCAATTTCGTGATAATCAGC |
| | GGTTTGACTACCGGGGTCAGGGAACCCTGGTCACCGTCTCGAGC (SEQ ID NO: 793) |
| ABT2-105 | GAGGTGCAGCTGTTGGAGTCTGGGGGAGGCTTGGTACAGCCTGGGGGGTCCCTGCGTCTCTC |
| | CTGTGCAGCCTCCGGATTCACCTTTTTTGCTTATGAGATGTCGTGGGTCCGCCAGGCTCCAG |
| | GGAAGGGTCTAGAGTGGGTCTCATCTATTTCTTATAATGGTACTCAGACATACTACGCAGAC |
| | TCCGTGAAGGGCCGGTTCACCATCTCCCGCGACAATTCCAAGAACACGCTGTATCTGCAAAT |
| | GAACAGCCTGCGTGCCGAGGATACCGCGGTATATTACTGTGCGAAAAGGCCGGATCTTTCGA |
| | GTTTTGACTACTGGGGTCAGGGAACCCTGGTCACCGTCTCGAGC (SEQ ID NO: 794) |
| ABT2-106 | GAGGTGCAGCTGTTGGAGTCTGGGGGAGGCTTGGTACAGCCTGGGGGGTCCCTGCGTCTCTC |
| | CTGTGCAGCCTCCGGATTCACCTTTAGTGATTATGGGATGAGTTGGGTCCGCCAGGCTCCAG |
| | GGAAGGGTCTAGAGTGGGTCTCAGCTATTGCTACTGATGGCGTGTCTACATACTACGCAGAC |
| | TCCGTGAAGGGCCGGTTCACCATCTCCCGCGACAATTCCAAGAACACGCTGTATCTGCAAAT |
| | GAACAGCCTGCGTGCCGAGGACACCGCGGTATATTACTGTGCGAAATATTTTTATCCGAATT |
| | TTGACTACTGGGGTCAGGGAACCCTGGTCACCGTCTCGAGC (SEQ ID NO: 795) |
| ABT2-107 | GAGGTGCAGCTGTTGGAGTCTGGGGGAGGCTTGGTACAGCCTGGGGGGTCCCTGCGTCTCTC |
| | CTGTGCAGCCTCCGGATTCACCTTTCCGCCTTATGCGATGGGTTGGGTCCGCCAGGCTCCAG |
| | GGAAGGGTCTGGAGTGGGTCTCATTGATTTATGAGAATGGTTTTAATACATACTACGCAGAC |
| | TCCGTGAAGGGCCGGTTCACCATCTCCCGCGACAATTCCAAGAACACGCTGTATCTGCAAAT |
| | GAACAGCCTGCGTGCCGAGGACACCGCGGTATATTACTGTGCGAAAACTTTGGGTTCTAATT |
| | TGTTTGACTACTGGGGTCAGGGAACCCTGGTCACCGTCTCGAGC (SEQ ID NO: 796) |
| ABT2-108 | GAGGTGCAGCTGTTGGAGTCTGGGGGAGGCTTGGTACAGCCTGGGGGGTCCCTGCGTCTCTC |
| | CTGTGCAGCCTCCGGATTCACCTTTGCTGAGTATACTATGATGTGGGTCCGCCAGGCTCCAG |
| | GGAAGGGTCTCGAGTGGGTCTCACGTATTGGGCAGGATGGTAAGAATACATACTACGCAGAC |
| | TCCGTGAAGGGCCGGTTCACCATCTCCCGCGACAATTCCAAGAACACGCTGTATCTGCAAAT |
| | GAACAGCCTGCGTGCCGAGGACACCGCGGTATATTACTGTGCGAAATATACGGGTCGGGTTG |
| | GTGTTCATCATCTTTTTGACTACTGGGGTCAGGGAACCCTGGTCACCGTCTCGAGC (SEQ |
| | ID NO: 797) |
| ABT2-108- | GAGGTGCAGCTGTTGGAGTCTGGGGGAGGCTTGGTACAGCCTGGGGGGTCCCTGCGTCTCTC |
| 533X | CTGTGCAGCCTCCGGATTCACCTTTGCTGACGAGGGGATGATGTGGGTCCGCCAGGCTCCAG |
| | GGAAAGGTCTCGAGTGGGTCTCACGTATTGGGCAGGATGGTAAGAATACTACTACGCAGAC |
| | TCCGTGAAGGGCCGGTTCACCATCTCCCGCGACAATTCCAAGAACACGCTGTATCTGCAAAT |
| | GAACAGCCTGCGTGCCGAGGACACCGCGGTATATTACTGTGCGAAATATACGGGTCGGATCC |
| | TCGGGCATCATCTTTTTGACTACTGGGGTCAGGGAACCCTGGTCACCGTCTCGAGC (SEQ |
| | ID NO: 798) |
| ABT2-108- | GAGGTGCAGCTGTTGGAGTCTGGGGGAGGCTTGGTACAGCCTGGGGGGTCCCTGCGTCTCTC |
| 534X | CTGTGCAGCCTCCGGATTCACCTTTGCTGACGAGGGGATGATGTGGGTCCGCCAGGCTCCAG |
| | GGAAAGGTCTCGAGTGGGTCTCACGTATTACCTACAGCGGTAAGAATACATACTACGCAGAC |
| | TCCGTGAAGGGCCGGTTCACCATCTCCCGCGACAATTCCAAGAACACGCTGTATCTGCAAAT |
| | GAACAGCCTGCGTGCCGAGGACACCGCGGTATATTACTGTGCGAAATATACGGGTCGGATCT |
| | TCTCCCATCATCTTTTTGACTACTGGGGTCAGGGAACCCTGGTCACCGTCTCGAGC (SEQ |
| | ID NO: 799) |
| ABT2-108- | GAGGTGCAGCTGTTGGAGTCTGGGGGAGGCTTGGTACAGCCTGGGGGGTCCCTGCGTCTCTC |
| 537X | CTGTGCAGCCTCCGGATTCACCTTTGCTGACGAGGGGATGATGTGGGTCCGCCAGGCTCCAG |
| | GGAAGGGTCTCGAGTGGGTCTCACGTATTGGGCAGGATGGTAAGAATACATACTACCGGATG |
| | GACGTGAAGGGCCGGTTCACCATCTCCCGCGACAATTCCAAGAACACGCTGTATCTGCAAAT |
| | GAACAGCCTGCGTGCCGAGGACACCGCGGTATATTACTGTGCGAAATATACGGGTCGGATCC |
| | TCGGGCATCATCTTTTTGACTACTGGGGTCAGGGAACCCTGGTCACCGTCTCGAGC (SEQ |
| | ID NO: 800) |
| ABT2-108- | GAGGTGCAGCTGTTGGAGTCTGGGGGAGGCTTGGTACAGCCTGGGGGGTCCCTGCGTCTCTC |
| 538X | CTGTGCAGCCTCCGGATTCACCTTTGCTGACGAGGGGATGATGTGGGTCCGCCAGGCTCCAG |
| | GGAAGGGTCTCGAGTGGGTCTCACGTATTACCTACAGCGGTAAGAATACGTACTACGCAGAC |
| | TCCGTGAAGGGCCGGTTCACCATCTCCCGCGACAATTCCAAGAACACGCTGTATCTGCAAAT |
| | GAACAGCCTGCGTGCCGAGGACACCGCGGTATATTACTGTGCGAAATATACGGGTCGGATCC |
| | TCGGGCATCATCTTTTTGACTACTGGGGTCAGGGAACCCTGGTCACCGTCTCGAGC (SEQ |
| | ID NO: 801) |
| ABT2-108- | GAGGTGCAGCTGTTGGAGTCTGGGGGAGGCTTGGTACAGCCTGGGGGGTCCCTGCGTCTCTC |
| 620X | CTGTGCAGCCTCCGGATTCACCTTTGCTGAGGAGTCGTGGATGTGGGTCCGCCAGGCTCCAG |
| | GGAAGGGTCTCGAGTGGGTCTCACGTATTGGGCAGGATGGTAAGAATACATACTACCGCGAG |
| | GACGTGAAGGGCCGGTTCACCATCTCCCGCGACAATTCCAAGAACACGCTATATCTGCAAAT |
| | GAACAGCCTGCGTGCCGAGGACACCGCGGTATATTACTGTGCGAAATATACGGGTCGGATCA |
| | TGGGCCATCATCTTTTTGACTACTGGGGTCAGGGAACCCTGGTCACCGTCTCGAGC (SEQ |
| | ID NO: 802) |

ABT2 VK dAbs:

| | |
|---|---|
| ABT2-6 | GACATCCAGATGACCCAGTCTCCATCCTCCCTGTCTGCATCTGTAGGAGACCGTGTCACCAT |
| | CACTTGCCGGGCAAGTCAGAGCATTGGGCTACTGTTAACTTGGTACCAGCAGAAACCAGGGA |
| | AAGCCCCTAAGCTCCTGATCTATATGGCATCCCAGTTGCAAAGTGGGGTCCCATCACGTTTC |
| | AGCGGCAGTGGATCTGGGACAGATTTCACTCTCACCATCAGCAGTCTGCAACCTGAAGATTT |
| | TGCTACGTACTACTGTCAACAGTGGCATCGTCCTCCTAGTACGTTCGGCCAAGGGACCAAGG |
| | TGGAAATCAAACGG (SEQ ID NO: 803) |
| ABT2-7 | GACATCCAGATGACCCAGTCTCCATCCTCCCTGTCTGCATCTGTAGGAGACCGTGTCACCAT |
| | CACTTGCCGGGCAAGTCAGAGCATTAAGTCTGGGTTAAATTGGTACCAGCAGAAACCAGGGA |
| | AAGCCCCTAAGCTCCTGATCTATATGGCATCCCAGTTGCAAAGTGGGGTCCCATCACGTTTC |
| | AGTGGCAGTGGATCTGGGACAGATTTCACTCTCACCATCAGCAGTCTGCAACCTGAAGATTT |
| | TGCTACGTACTACTGTCAACAGTGGCATCGTCCTCCTAGTACGTTCGGCCAAGGGACCAAGG |
| | TGGAAATCAAACGG (SEQ ID NO: 804) |
| ABT2-8 | GACATCCAGATGACCCAGTCTCCATCCTCCCTGTCTGCATCTGTAGGAGACCGTGTCACCAT |
| | CACTTGCCGGGCAAGTCAGAGCATTAAGTCTATGTTAGCTTGGTACCAGCAGAAACCAGGGA |
| | AAGCCCCTAAGCTCCTGATCTATATGGCATCCAATTTGCAAAGTGGGGTCCCATCACGTTTC |
| | AGTGGCAGTGGATCTGGGACAGATTTCACTCTCACCATCAGCAGTCTGCAACCTGAAGATTT |
| | TGCTACGTACTACTGTCAACAGACTATTGTTAAGCCTTCTACGTTCGGCCAAGGGACTAAGG |
| | TGGAAATCAAACGG (SEQ ID NO: 805) |
| ABT2-42 | GACATCCAGATGACCCAGTCTCCATCCTCCCTGTCTGCATCTGTAGGAGACCGTGTCACCAT |
| | CACTTGCCGGGCAAGTCAGTATATTGAGAAGTGGTTAACTTGGTATCAGCAGAAACCAGGGA |
| | AAGCCCCTACGCTCCTGATCTATCGTGGGTCCTTGTTGCAAAGTGGGGTCCCATCACGTTTC |
| | AGTGGCAGTGGATCTGGGACAGATTTCACTCTCACCATCAGCAGTCTGCAACCTGAAGATTT |
| | TGCTACGTACTACTGTCAACAGACTGAGTATTGGCCTTTTACGTTCGGCCAAGGGACCAAGG |
| | TGGAAATCAAACGG (SEQ ID NO: 806) |
| ABT2-43 | GACATCCAGATGACCCAGTCTCCATCCTCCCTGTCTGCATCTGTAGGAGACCGTGTCACCAT |
| | CACTTGCCGGGCAAGTCAGAATATTGATACGTATTTAACTTGGTACCAGCAGAAACCAGGGA |
| | AAGCCCCTAGGCTCCTGATCTATGGGGCTTCCACGTTGCAAAGTGGGGTCCCATCACGTTTC |
| | AGTGGCAGTGGATCTGGGACAGATTTCACTCTCACCATCAGCAGTCTGCAACCTGAAGATTT |
| | TGCTACGTACTACTGTCAACAGCGTGCTTATTATCCTACGACGTTCGGCCAAGGGACCAAGG |
| | TGGAAATCAAACGG (SEQ ID NO: 807) |
| ABT2-44 | GACATCCAGATGACCCAGTCTCCATCCTCCCTGTCTGCATCTGTAGGAGACCGTGTCACCAT |
| | CACTTGCCGGGCAAGTCAGGATATTGGTGAGTGGTTAGAGTGGTATCAGCAGAAACCAGGGA |
| | AAGCCCCTAAGCTCCTGATCTATCGGGCGTCCACTTTGCAAAGTGGGGTCCCATCACGTTTC |
| | AGTGGCAGTGGATCTGGGACAGATTTCACTCTCACCATCAGCAGTCTGCAACCTGAAGATTT |
| | TGCTACGTACTACTGTCAACAGCATGCGTATTATCCTTTTACGTTCGGCCAAGGGACCAAGG |
| | TGGAAATCAAACGG (SEQ ID NO: 808) |
| ABT2-46 | GACATCCAGATGACCCAGTCTCCATCCTCCCTGTCTGCATCTGTAGGAGACCGTGTCACCAT |
| | CACTTGCCGGGCAAGTCAGAGTATTATTGAGTGGTTAAGTTGGTACCAGCAGAAACCAGGGA |
| | AAGCCCCTAAGCTCCTGATCTATCGTACTTCCGTGTTGCAAAGTGGGGTCCCATCACGTTTC |
| | AGTGGCAGTGGATCTGGGACAGATTTCACTCTCACCATCAGCAGTCTGCAACCTGAAGATTT |
| | TGCTACGTACTACTGTCAACAGAATGAGTTTTGGCCTTTTACGTTCGGCCAAGGGACCAAGG |
| | TGGAAATCAAACGG (SEQ ID NO: 809) |
| ABT2-53 | GACATCCAGATGACCCAGTCTCCATCCTCCCTGTCTGCATCTGTAGGAGACCGTGTCACCAT |
| | CACTTGCCGGGCAAGTCAGAGCATTAAGAAGCATTTAGCGTGGTACCAGCAGAAACCAGGGA |
| | AAGCCCCTAAGCTCCTGATCTATAATGCATCCAAGTTGCAAAGTGGGGTCCCATCACGTTTC |
| | AGTGGCAGTGGATCTGGGACAGATTTCACTCTCACCATCAGCAGTCTGCAACCTGAAGATTT |
| | TGCTACGTACTACTGTCAACAGACTAAGCGGGAGCCTAAGACGTTTGGCCAAGGGACCAAGG |
| | TGGAAATCAAACGG (SEQ ID NO: 810) |
| ABT2-54 | GACATCCAGATGACCCAGTCTCCATCCTCCCTGTCTGCATCTGTAGGAGACCGTGTCACCAT |
| | CACTTGCCGGGCAAGTCAGAGCATTAAGTCTGGGTTAAATTGGTACCAGCAGAAACCAGGGA |
| | AAGCCCCTAAGCTCCTGATCTATATGGCATCCCAGTTGCAAAGTGGGGTCCCATCACGTTTC |
| | AGTGGCAGTGGATCTGGGACAGATTTCACTCTCACCATCAGCAGTCTGCAACCTGAAGATTT |
| | TGCTACGTACTACTGTCAACAGTGGCATCGTCCTCCTAGTACGTTCGGCCAAGGGACCAAGG |
| | TGGAAATCAAACGG (SEQ ID NO: 811) |
| ABT2-55 | GACATCCAGATGACCCAGTCTCCATCCTCCCTGTCTGCATCTGTAGGAGACCGTGTCACCAT |
| | CACTTGCCGGGCAAGTCAGAGCATTAAGACTAGGTTAAATTGGTACCAGCAGAAACCAGGGA |
| | AAGCCCCTAAGCTCCTGATCTATCTGGCATCCCGTTTGCAAAGTGGGGTCCCATCACGTTTC |
| | AGTGGCAGTGGATCTGGGACAGATTTCACTCTCACCATCAGCAGTCTGCAACCTGAAGATTT |
| | TGCTACGTACTACTGTCAACAGGTGTGGCGTCTTCCTAGTACGTTCGGCCAAGGGACCGG |
| | TGGAAATCAAACGG (SEQ ID NO: 812) |
| ABT2-56 | GACATCCAGATGACCCAGTCTCCATCCTCCCTGTCTGCATCTGTAGGAGACCGTGTCACCAT |
| | CACCTGCCGGGCAAGTCAGAGCATTGGGAGGCGGTTAAGTTGGTACCAGCAGAAACCAGGGA |
| | AAGCCCCTAAGCTCCTGATCTATAAGGCATCCCGTTTGCAAAGTGGGGTCCCATCACGTTTC |
| | AGTGGCAGTGGATCTGGGACAGATTTCACTCTCACCATCAGCAGTCTGCAACCTGAAGATTT |
| | TGCTACGTACTACTGTCAACAGCGTGTTAGTGTTCCTCGGACGTTCGGCCAAGGGACCAAGG |
| | TGGAAATCAAACGG (SEQ ID NO: 813) |
| ABT2-57 | GACATCCAGATGACCCAGTCTCCATCCTCCCTGTCTGCATCTGTAGGAGACCGTGTCACCAT |
| | CACTTGCCGGGCAAGTCAGAGCATTGCGCGTCAGTTAGCGTGGTACCAGCAGAAACCAGGGA |
| | AAGCCCCTAAGCTCCTGATCTATAAGGCATCCCGGTTGCAAAGTGGGGTCCCATCACGTTTC |
| | AGTGGCAGTGGATCTGGGACAGATTTCACTCTCACCATCAGCAGTCTGCAACCTGAAGATTT |
| | TGCTACGTACTACTGTCAACAGTATCGGATGCGGCCTAAGACGTTCGGCCAAGGGACCAAGG |
| | TGGAAATCAAACGG (SEQ ID NO: 814) |
| ABT2-58 | GACATCCAGATGACCCAGTCTCCATCCTCCCTGTCTGCATCTGTAGGAGACCGTGTCACCAT |
| | CACTTGCCGGGCAAGTCAGAGCATTTCTAAGAAGTTAGATTGGTACCAGCAGAAACCAGGGA |
| | AAGCCCCTAAGCTCCTGATCTATTCGGCATCCCATTTGCAAAGTGGGGTCCCATCACGTTTC |
| | AGTGGCAGTGGATCTGGGACAGATTTCACTCTCACCATCAGCAGTCTGCAACCTGAAGATTT |
| | TGCTACGTACTACTGTCAACAGAGGCGGCGTAAGCCTACTACGTTCGGCCAAGGGACCAAGG |
| | TGGAAATCAAACGG (SEQ ID NO: 815) |
| ABT2-59 | GACATCCAGATGACCCAGTCTCCATCCTCCCTGTCTGCATCTGTAGGAGACCGTGTCACCAT |
| | CACTTGCCGGGCTAGTCAGAGCATTAATGTATTTTTATCGTGGTACCAGCAGAAACCAGGGA |
| | AAGCCCCTAAGCTCCTGATCTATAATGCATCCAATTTGCAAAGTGGGGTCCCATCACGTTTC |
| | AGTGGCAGTGGATCTGGGACAGATTTCACTCTCACCATCAGCAGTCTGCAACCTGAAGATTT |
| | TGCTACGTACTACTGTCAACAGCGGGCTCTTTATCCTACTACGTTCGGCCAAGGGACCAAGG |
| | TGGAAATCAAACGG (SEQ ID NO: 816) |
| ABT2-60 | GACATCCAGATGACCCAGTCTCCATCCTCCCTGTCTGCATCTGTAGGAGACCGTGTCACCAT |
| | CACTTGCCGGGCAAGTCAGAGCATTAGGGTTTTTTTATCTTGGTACCAGCAGAAACCAGGGA |
| | AAGCCCCTAAGCTCCTGATCTATAATGCATCCAATTTGCAAAGTGGGGTCCCATCACGTTTC |
| | AGTGGCAGTGGATCTGGGACAGATTTCACTCTCACCATCAGCAGTCTGCAACCTGAAGATTT |
| | TGCTACGTACTACTGTCAACAGCGGGCTCTTTATCCTACTACGTTCGGCCAAGGGACCAAGG |
| | TGGAAATCAAACGG (SEQ ID NO: 817) |
| ABT2-61 | GACATCCAGATGACCCAGTCTCCATCCTCCCTGTCTGCATCTGTAGGAGACCGTGTCACCAT |
| | CACTTGCCGGGCAAGTCAGAGCATTAGGGTTTTTTTATCTTGGTATCAGCAGAAACCAGGGA |
| | AAGCCCCTAAGCTCCTGATCTATAACGCATCCCATTTGCAAAGTGGGGTCCCATCACGTTTC |
| | AGTGGCAGTGGATCTGGGACAGATTTCACTCTCACCATCAGCAGTCTGCAACCTGAAGATTT |
| | TGCTACGTACTACTGTCAACAGCGGGCTCTTTATCCTACTACGTTCGGCCAAGGGACCAAGG |
| | TGGAAATCAAACGG (SEQ ID NO: 818) |
| ABT2-62 | GACATCCAGATGACCCAGTCTCCATCCTCCCTGTCTGCATCTGTAGGAGACCGTGTCACCAT |
| | CACTTGCCGGGCAAGTCAGAGCATTCAGACTTATTTAAGTTGGTATCAGCAGAAACCAGGGA |
| | AAGCCCCTAAGCTCCTGATCTATAATGCATCCAATTTGCAAAGTGGGGTCCCATCACGTTTC |
| | AGTGGCAGTGGATCTGGGACAGATTTCACTCTCACCATCAGCAGTCTGCAACCTGAAGATTT |
| | TGCTACGTACTACTGTCAACAGCGGGCTCTTTATCCTACTACGTTCGGCCAAGGGACCAAGG |
| | TGGAAATCAAACGG (SEQ ID NO: 819) |
| ABT2-63 | GACATCCAGATGACCCAGTCTCCATCCTCCCTGTCTGCATCTGTAGGAGACCGTGTCACCAT |
| | CACTTGCCGGGCAAGTCAGAGCATTAGGGTTTTTTTATCTTGGTATCAGCAGAAACCAGGGA |
| | AAGCCCCTAAGCTCCTGATCTATAATGCATCCTATTTGCAAAGTGGGGTCCCATCACGTTTC |
| | AGTGGCAGTGGATCTGGGACAGATTTCACTCTCACCATCAGCAGTCTGCAACCTGAAGATTT |
| | TGCTACGTACTACTGTCAACAGCGGGCTCTTTATCCTACTACGTTCGGCCAAGGGACCAAGG |
| | TGGAAATCAAACGG (SEQ ID NO: 820) |
| ABT2-67 | GACATCCAGATGACCCAGTCTCCATCCTCCCTGTCTGCATCTGTAGGAGACCGAGTCACCAT |
| | CACTTGCCGGGCAAGTCAGTATATTGGGGAGCATTTAGCTTGGTACCAGCAGAAACCGGGGA |
| | AAGCCCCTAAGCTCCTGATCTATCATAATTCCGCTTTGCAAAGTGGGGTCCCATCACGTTTC |
| | AGTGGCAGTGGATCTGGGACAGATTTCACTCTCACCATCAGCAGTCTGCAACCTGAAGATTT |
| | TGCTACGTACTACTGTCAACAGCATGCGTTTCTTCCTAATACGTTCGGCCAAGGGACCAAGG |
| | TGGAAATCAAACGG (SEQ ID NO: 821) |
| ABT2-68 | GACATCCAGATGACCCAGTCTCCATCCTCCCTGTCTGCATCTGTAGGAGACCGTGTCACCAT |
| | CACTTGCCGGGCAAGTCAGAATATTTGGTATCATTTAAATTGGTACCAGCAGAAACCAGGGA |
| | AAGCCCCTAAGCTCCTGATCTATCTTGGTTCCCGGTTGCAAAGTGGGGTCCCATCACGTTTC |
| | AGTGGCAGTGGATCTGGGACAGATTTCACTCTCACCATCAGCAGTCTGCAACCTGAAGATTT |
| | CGCTACGTACTACTGTCAACAGATTCATCATGATCCTTTTACGTTCGGCCAAGGGACCAAGG |
| | TGGAAATCAAACGG (SEQ ID NO: 822) |
| ABT2-76 | GACATCCAGATGACCCAGTCTCCATCCTCCCTGTCTGCATCTGTAGGAGACCGTGTCACCAT |
| | CACTTGCCGGGCAAGTCAGTCGATTGATCGGTGGTTAGCGTGGTATCAGCAGAAACCAGGGA |
| | AAGCCCCTAAGCTCCTGATCTATCGGGGTTCCATTTTGCAAAGTGGGGTCCCATCACGTTTC |
| | AGTGGCAGTGGATCTGGGACAGATTTCACTCTCACCATCAGCAGTCTGCAACCTGAAGATTT |
| | TGCTACGTACTACTGTCAACAGGTTGCGTTTTGGCCTCCTACGTTCGGCCAAGGGACCAAGG |
| | TGGAAATCAAACGG (SEQ ID NO: 823) |
| ABT2-77 | GACATCCAGATGACCCAGTCTCCATCCTCCCTGTCTGCATCTGTAGGAGACCGTGTCACCAT |
| | CACTTGCCGGGCAAGTCAGAATATTGGGGCGCATTTAAAGTGGTATCAGCAGAAACCAGGGA |
| | AAGCCCCTAAGCTCCTGATCTATCGTACTTCCCGGTTGCAAAGTGGGGTCCCATCACGTTTC |
| | AGTGGCAGTGGATCTGGGACAGATTTTACTCTCACCATCAGCAGTCTGCAACCTGAAGATTT |
| | TGCTACGTACTACTGTCAACAGAATCATACTCGTCCTCATACGTTCGGCCAAGGGACCAAGG |
| | TGGAAATCAAACGG (SEQ ID NO: 824) |
| ABT2-79 | GACATCCAGATGACCCAGTCTCCATCCTCCCTGTCTGCATCTGTAGGAGACCGTGTCACCAT |
| | CACTTGCCGGGCAAGTCAGCAGATTGGTGAGTGGTTAAATTGGTATCAGCAGAAACCAGGGA |
| | AAGCCCCTAAGCTCCTGATCTATCGGACGTCCCTGTTGCAAAGTGGGGTCCCATCACGTTTC |
| | AGTGGCAGTGGATCTGGGACAGATTTCACTCTCACCATCAGCAGTCTGCAACCTGAAGATTT |
| | TGCTACGTACTACTGTCAACAGACTAATTTTTGGCCTCCTACGTTCGGCCAAGGGACCAAGG |
| | TGGAAATCAAACGG (SEQ ID NO: 825) |
| ABT2-80 | GACATCCAGATGACCCAGTCTCCATCCTCCCTGTCTGCATCTGTAGGAGACCGTGTCACCAT |
| | CACTTGCCGGGCAAGTCAGGCTATTTATCATAATTTAAAGTGGTACCAGCAGAAACCAGGGA |
| | AGGCCCCTAAGCTCCTGATCTATCATACGTCCTATTTGCAAAGTGGGGTCCCATCACGTTTC |
| | AGTGGCAGTGGATCTGGGACAGATTTCACTCTCACCATCAGCAGTCTGCAACCTGAAGATTT |
| | TGCTACGTACTACTGTCAACAGACGTGGGCTTATCCTTATACGTTCGGCCAAGGGACCAAGG |
| | TGGAAATCAAACGG (SEQ ID NO: 826) |
| ABT2-81 | GACATCCAGATGACCCAGTCTCCATCCTCCCTGTCTGCATCTGTAGGAGACCGTGTCACCAT |
| | CACTTGCCGGGCAAGTCAGCCGATTTATACTGAGTTATCTTGGTATCAGCAGAAACCAGGGA |
| | AAGCCCCTAAGCTCCTGATCTATGGTTCGTCCATTTTGCAAAGTGGGGTCCCATCACGTTTC |
| | AGTGGCAGTGGATCTGGGACAGATTTCACTCTCACCATCAGCAGTCTGCAACCTGAAGATTT |
| | TGCTACGTACTACTGTCAACAGTTTGCGTATCATCCTGTGACGTTCGGCCAAGGGACCAAGG |
| | TGGAAATCAAACGG (SEQ ID NO: 827) |
| ABT2-83 | GACATCCAGATGACCCAGTCTCCATCCTCCCTGTCTGCATCTGTAGGAGACCGTGTCACCAT |
| | CACTTGCCGGGCAAGTCAGCCTATTCAGACTAAGTTAGCGTGGTATCAGCAGAAACCAGGGA |
| | AAGCCCCTAAGCTCCTGATCTATCATAATTCCATTTTGCAAAGTGGGGTCCCATCACGTTTC |
| | AGTGGCAGTGGATCTGGGACAGATTTCACTCTCACCATCAGCAGTCTGCAACCTGAAGATTT |
| | TGCTACGTACTACTGTCAACAGTTTCGTAAGCATCCTTTTACGTTCGGCCAAGGGACCAAGG |
| | TGGAAATCAAACGG (SEQ ID NO: 828) |
| ABT2-84 | GACATCCAGATGACCCAGTCTCCATCCTCCCTGTCTGCATCTGTAGGAGACCGTGTCACCAT |
| | CACTTGCCGGGCAAGTCAGATTATTGATACGTGGTTAAATTGGTATCAGCAGAAACCAGGGA |
| | AAGCCCTTAAGCTCCTGATCTATCGTACTTCCTCTTTGCAAAGTGGGGTCCCATCACGTTTC |
| | AGTGGCAGTGGATCTGGGACAGATTTCACTCTCACCATCAGCAGTCTGCAACCTGAAGATTT |
| | TGCTACGTACTACTGTCAACAGAGTAATTATTGGCCTGCTACGTTTGGCCAAGGGACCAAGG |
| | TGGAAATCAAACGG (SEQ ID NO: 829) |
| ABT2-85 | GACATCCAGATGACCCAGTCTCCATCCTCCCTGTCTGCATCTGTAGGAGACCGTGTCACCAT |
| | CACTTGCCGGGCAAGTCAGAGGATTCGTAAGCGTTTAAAGTGGTATCAGCAGAAACCAGGGA |
| | AAGCCCCTAAGCTCCTGATCTATTCGTCGTCCAAGTTGCAAAGTGGGGTCCCATCACGTTTC |
| | AGCGGCAGTGGATCTGGGACAGATTTCACTCTCACCATCAGCAGTCTGCAACCTGAAGATTT |
| | TGCTACGTACTACTGTCAACAGAATTTTTCTAAGCCTTCGACGTTCGGCCAAGGGACCAAGG |
| | TGGAAATCAAACGG (SEQ ID NO: 830) |
| ABT2-86 | GACATCCAGATGACCCAGTCTCCATCCTCCCTGTCTGCATCTGTAGGAGACCGTGTCACCAT |
| | CACTTGCCGGGCAAGTCAGAGTATTAAGAAGTATTTAGCTTGGTATCAGCAGAAACCAGGGA |
| | AAGCCCCTAAGCTCCTGATCTATCTGGCTTCCACGTTGCAAAGTGGGGTCCCATCACGTTTC |
| | AGTGGCAGTGGATCTGGGACAGATTTCACTCTCACCATTAGCAGTCTGCAACCTGAAGATTT |
| | CGCTACGTACTACTGTCAACAGACGCTGACGTATCCTTCTACGTTCGGCCAAGGGACTAAGG |
| | TGGAAATCAAACGG (SEQ ID NO: 831) |
| ABT2-87 | GACATCCAGATGACCCAGTCTCCATCCTCCCTGTCTGCATCTGTAGGAGACCGTGTCACCAT |
| | CACTTGCCGGGCAAGTCAGTCGATTAGTGTTTATTTATCTTGGTATCAGCAGAAACCAGGGA |
| | AAGCCCCTAAGCTCCTGATCTATAATGCTTCCATTTTGCAAAGTGGGGTCCCATCACGTTTC |
| | AGTGGCAGTGGATCTGGGACAGATTTCACTCTCACCATCAGCAGTCTGCAACCTGAAGATTT |
| | TGCTACGTACTACTGTCAACAGAGGGCTCATTATCCTACTACGTTCGGCCAAGGGACCAAGG |
| | TGGAAATCAAACGG (SEQ ID NO: 832) |
| ABT2-88 | GACATCCAGATGACCCAGTCTCCATCCTCCCTGTCTGCATCTGTAGGAGACCGTGTCACCAT |
| | CACTTGCCGGGCAAGTCAGTCTATTGATGAGTGGTTAGAGTGGTACCAGCAGAAACCAGGGA |
| | AAGCCCCTAAGCTCCTGATCTATCGTGCGTCCCGTTTGCAAAGTGGGGTCCCATCACGTTTC |
| | AGTGGCAGTGGATCTGGGACAGATTTCACTCTCACCATCAGCAATCTGCAACCTGAAGATTT |
| | TGCTACGTACTACTGTCAACAGGCGGCTTCGTGGCCTCGTACGTTCGGCCAAGGGACCAAGG |
| | TGGAAATCAAACGG (SEQ ID NO: 833) |
| ABT2-89 | GACATCCAGATGACCCAGTCTCCATCCTCCCTGTCTGCATCTGTAGGAGACCGTGTCACCAT |
| | CACTTGCCGGGCAAGTCAGTCGATTGATCGGTGGTTAGCGTGGTATCAGCAGAAACCAGGGA |
| | AAGCCCCTAAGCTCCTGATCTATCGGGGTTCCATTTTGCAAAGTGGGGTCCCATCACGTTTC |
| | AGTGGCAGTGGATCTGGGACAGATTTCACTCTCACCATCAGCAGTCTGCAACCTGAAGATTT |
| | TGCTACGTACTACTGTCAACAGGTTGCGTTTTGGCCTCCTACGTTCGGCCAAGGGACCAAGG |
| | TGGAAATCAAACGG (SEQ ID NO: 834) |
| ABT2-90 | GACATCCAGATGACTCAGTCTCCATCCTCCCTGTCTGCATCTGTAGGAGACCGTGTCACCAT |
| | CACTTGCCGGGCAAGTCAGAATATTGATCAGTGGTTAGCGTGGTACCAGCAGAAACCAGGGA |
| | AAGCCCCTAAGCTCCTGATCTATCGGACGTCCCGTTTGCAAAGTGGGGTCCCATCACGTTTC |
| | AGTGGCAGTGGATCCGGGACAGATTTCACTCTCACCATCAGCAGTCTGCAACCTGAAGATTT |
| | CGCTACGTACTACTGTCAACAGGTTGCTGCGTTTCCTGCTACGTTCGGCCAAGGGACCAAGG |
| | TGGAAATCAAACGG (SEQ ID NO: 835) |
| ABT2-91 | GACATCCAGATGACCCAGTCTCCATCCTCCCTGTCTGCATCTGTAGGAGACCGTGTCACCAT |
| | CACTTGCCGGGCAAGTCAGCTTATTGGGAAGCATTTAAATTGGTATCAGCAGAAACCAGGGA |
| | AAGCCCCTAAGCTCCTGATCTATCATGAGTCCGCTTTGCAAAGTGGGGTCCCATCACGTTTC |
| | AGTGGCAGTGGATCTGGGACAGATTTCACTCTCACCATCAGCAGTCTGCAACCTGAAGATTT |
| | TGCTACGTACTACTGTCAACAGCATGCGTTTTCTCCTCATACGTTCGGCCAAGGGACCAAGG |
| | TGGAAATCAAACGG (SEQ ID NO: 836) |
| ABT2-93 | GACATCCAGATGACCCAGGCTCCATCCTCCCTGTCTGCATCAGTAGGAGACCGTGTCACCAT |
| | CACTTGCCGGGCAAGTCAGTCGATTGGTCCGCATTTAAATTGGTACCAGCAGAAACCAGGGA |
| | AAGCCCCTAAGCTCCTGATCTATCATATTTCCACTTTGCAAAGTGGGGTCCCATCACGTTTC |
| | AGTGGCAGTGGATCTGGGACAGATTTCACTCTCACCATCAGCAGTCCGCAACCTGAAGATTT |
| | TGCTACGTACTACTGTCAGCAGCATGCGTTTTCTCCTCATACGTTCGGCCAAGGGACCAAGG |
| | TGGAAATCAAACGG (SEQ ID NO: 837) |
| ABT2-94 | GACATCCAGATGACCCAGTCTCCATCCTCCCTGTCTGCATCTGTAGGAGACCGTGTCACCAT |
| | CACTTGCCGGGCAAGTCAGGCGATTGGTATTCATTTAGATTGGTACCAGCAGAAACCAGGGA |
| | AAGCCCCTAAGCTCCTGATCTATGATACTTCCTCTTTGCAAAGTGGGGTCCCATCACGTTTC |
| | AGTGGCAGTGGATCTGGGACAGATTTCACTCTCACCATCAGCAGTCTGCAACCTGAAGATTT |
| | TGCTACGTACTACTGTCAACAGCATGCGCTTTTGCCTCATACGTTCGGCCAAGGGACCAAGG |
| | TGGAAATCAAACGG (SEQ ID NO: 838) |
| ABT2-95 | GACATCCAGATGACCCAGTCTCCATCCTCCCTGTCTGCATCTGTAGGAGACCGTGTCACCAT |
| | CACTTGCCGGGCAAGTCAGTTTATTGGTCATTATTTAGCTTGGTATCAGCAGAAACCAGGGA |
| | AAGCCCCTAAGCTCCTGATCTATCCGGCGTCCAAGTTGCAAAGTGGGGTCCCATCACGTTTC |
| | AGTGGCAGTGGATCTGGGACAGATTTCACTCTCACCATCAGCAGTCTGCAACCTGAAGATTT |
| | TGCTACGTACTACTGTCAACAGACTTATCTGAATCCTACGACGTTCGGCCAAGGGACCAAGG |
| | TGGAAATCAAACGG (SEQ ID NO: 839) |
| ABT2-96 | GACATCCAGATGACCCAGTCTCCATCCTCCCTGTCTGCATCTGTAGGAGACCGTGTCACCAT |
| | CACTTGCCGGGCAAGTCAGGGTATTAAGAGGAAGTTAAAGTGGTACCAGCAGAAACCAGGGA |
| | AAGCCCCTAAGCTCCTGATCTATCAGGCTTCCCGTTTGCAAAGTGGGGTCCCATCACGTTTC |
| | AGTGGCAGTGGATCTGGGACAGATTTCACTCTCACCATCAGCAGTCTGCAACCTGAAGATTT |
| | TGCTACGTACTACTGTCAACAGAATGCGCAGCGTCCTTTTACGTTCGGCCAAGGGACCAAGG |
| | TGGAAATCAAACGG (SEQ ID NO: 840) |
| ABT2-97 | GACATCCAGATGACCCAGTCTCCATCCTCCCTGTCTGCATCTGTAGGAGACCGTGTCACCAT |
| | CACTTGCCGGGCAAGTCAGCAGATTGATCAGTGGTTATCGTGGTACCAGCAGAAACCAGGGA |
| | AAGCCCCTAAGCTCCTGATCTATCGGACTTCCTTGTTGCAAAGTGGGGTCCCATCACGTTTC |
| | AGTGGCAGTGGATCTGGGACAGATTTCACTCTCACCATCAGCAGCCTGCAACCTGAAGATTT |
| | TGCTACGTACTACTGTCAACAGGCTGAGTATTGGCCTTTTACGTTCGGCCAAGGGACCAAGG |
| | TGGAAATCAAACGG (SEQ ID NO: 841) |
| ABT2-98 | GACATCCAGATGACCCAGTCTCCATCCTCCCTGTCTGCATCTGTAGGAGACCGTGTTACCAT |
| | CACTTGCCGGGCAAGTCAGTATATTGGTAATAATTTACATTGGTACCAGCAGAAACCAGGGA |
| | AAGCCCCTAAGCTCCTGATCTATAAGGGGTCCAAGTTGCAAAGTGGGGTCCCATCACGTTTC |
| | AGTGGCAGTGGATCTGGGACAGATTTCACTCTCACCATCAGCAGTCTGCAACCTGAAGATTT |
| | CGCTACGTACTACTGTCAACAGAATTCTGCTCGTCCTCATACGTTCGGCCAAGGGACCAAGG |
| | TGGAAATCAAACGG (SEQ ID NO: 842) |

[0487] Forming part of the present disclosure is the appended Sequence Listing.

### EQUIVALENTS

[0488] Those skilled in the art will recognize, or be able to ascertain using no more than routine experimentation, many equivalents to the specific embodiments of the invention described herein. Such equivalents are intended to be encompassed by the following claims. The contents of all references, patents and published patent applications cited throughout this application are incorporated herein by reference

1. An isolated, dual-specific antibody, or an antigen-binding portion thereof, with the following characteristics:
a) dissociates from human IL-1α with a K_{D} of 3×10⁻⁷ M or less;
b) dissociates from human IL-1β with a K_{D} of 5×10⁻⁵ M or less; and
c) does not bind mouse IL-1α or mouse IL-1β.

2. The antibody, or antigen-binding portion, of claim 1, which neutralizes human IL-1α in a standard in vitro assay with an ND₅₀ of 900 nM or less.

3-4. (canceled)

5. The antibody, or antigen-binding portion, of claim 1, which neutralizes human IL-1β in a standard in vitro assay with an ND₅₀ of 800 nM or less or 200 nM or less.

6. (canceled)

7. The antibody, or antigen-binding portion thereof, of claim 5, which neutralizes IL-1α in a standard in vitro assay with an ND₅₀ of 10 nM or less.

8. The antibody, or antigen-binding portion, of claim 1, which neutralizes human IL-1α in a standard in vitro assay with an ND₅₀ of 900 nM or less, and neutralizes human IL-1β in a standard in vitro assay with an ND₅₀ of 800 nM or less.

9. (canceled)

10. The antibody, or antigen-binding portion, of claim 1, which dissociates from IL-1α with a K_{D} selected from the group consisting of 1×10⁻⁸ M or less; 1×10⁻⁹ M or less; 40-86 nM or less; 20-42 nM or less; 32-42 nM or less; 7-12 nM or less; 3.0×10⁻⁷ M or less; 1.1×10⁻⁷ M or less; 6.1×10⁻⁸ M or less; 6×10⁻⁸ M or less; 4.2×10⁻⁸ M or less; 1.3×10⁻⁸ M or less; and 1.1×10⁻⁹ M or less.

11. The antibody, or antigen-binding portion, of claim 1, which dissociates from IL-1β with a K_{D} selected from the group consisting of 5.4×10⁻⁵ M or less; 2.8×10⁻⁶ M or less; 1.3×10⁻⁶ M or less; 9.3×10⁻⁷ M or less; 2×10⁻⁷ M or less; 1.1×10⁻⁷ M or less; and 2.8×10⁻⁸ M or less.

12. The antibody, or antigen-binding portion, of claim 11, which dissociates from IL-1α with a K_{D} selected from the group consisting of 1×10⁻⁸ M or less; 1×10⁻⁹ M or less; 40-86 nM or less; 20-42 nM or less; 32-42 nM or less; 7-12 nM or less; 3.0×10⁻⁷ M or less; 1.1×10⁻⁷ M or less; 6.1×10⁻⁸ M or less; 6×10⁻⁸ M or less; 4.2×10⁻⁸ M or less; 1.3×10⁻⁸ M or less; and 1.1×10⁻⁹ M or less.

13. The antibody, or antigen-binding portion, of claim 1, comprising
a heavy chain variable region comprising complementary determining regions (CDRs) as set forth in an amino acid sequence selected from the group consisting of SEQ ID NO: 16 (ABT1-96); SEQ ID NO: 52 (ABT2-108); SEQ ID NO: 44 (ABT2-65); SEQ ID NO: 16 (ABT1-96); SEQ ID NO: 32 (ABT2-13); SEQ ID NO: 20 (ABT1-98); SEQ ID NO: 4 (ABT1-6-23); and
a light chain variable region comprising CDRs as set forth in an amino acid sequence selected from the group consisting of SEQ ID NO: 36 (ABT2-42); SEQ ID NO: 24 (ABT1-122); SEQ ID NO: 28 (ABT1-141); SEQ ID NO: 40 (ABT2-46); SEQ ID NO: 12 (ABT1-95); SEQ ID NO: 48 (ABT2-76).

14. The antibody, or antigen-binding portion, of claim 1, which comprises at least two heavy chain variable regions each comprising CDRs as set forth in an amino acid sequence selected from the group consisting of SEQ ID NO: 16 (ABT1-96); SEQ ID NO: 32 (ABT2-13); SEQ ID NO: 4 (ABT1-6-23); SEQ ID NO: 40 (ABT2-46).

15. An isolated antibody, or an antigen-binding portion thereof, having dual-specificity for human IL-1α and human IL-1β comprising
a variable light chain comprising complementary determining regions (CDRs) as set forth in an amino acid sequence selected from the group consisting of SEQ ID NO: 12, SEQ ID NO: 24, and SEQ ID NO: 28, or
a variable heavy chain comprising CDRs as set forth in an amino acid sequence selected from the group consisting of SEQ ID NO: 4, SEQ ID NO: 8, SEQ ID NO: 16, and SEQ ID NO: 20.

16. The antibody, or antigen-binding portion thereof, of claim 15 which dissociates from human IL-1β with a K_{D} selected from the group consisting of 5×10⁻⁵ M or less; 5.4×10⁻⁵ M or less; 2.8×10⁻⁶ M or less; 1.3×10⁻⁶ M or less; 9.3×10⁻⁷ M or less; 2×10⁻⁷ M or less; 1.1×10⁻⁷ M or less; and 2.8×10⁻⁸ M or less.

17. The antibody, or antigen-binding portion thereof, of claim 15, which neutralizes human IL-1β in a standard in vitro assay with an ND₅₀ of 800 nM or less.

18. (canceled)

19. The antibody, or antigen-binding portion thereof, of claim 15, which neutralizes IL-1β in a standard in vitro assay with an ND₅₀ of 200 nM or less.

20. (canceled)

21. The antibody, or antigen-binding portion thereof, of claim 15, which dissociates from human IL-1β with a K_{D} of 5×10⁻⁵ M or less and neutralizes human IL-1β in a standard in vitro MRC5 assay with an ND₅₀ of 800 nM or less.

22. The antibody, or an antigen-binding portion thereof, of claim 15, further comprising either
a variable light chain comprising CDRs as set forth in an amino acid sequence selected from the group consisting of SEQ ID NO: 36, SEQ ID NO: 40, and SEQ ID NO: 48, or
a variable heavy chain comprising CDRS as set forth in an amino acid sequence selected from the group consisting of SEQ ID NO: 32, SEQ ID NO: 44, SEQ ID NO: 52.

23. An isolated antibody, or an antigen-binding portion thereof, having dual-specificity for human IL-1α and human IL-1β comprising either
a variable light chain comprising CDRs as set forth in an amino acid sequence selected from the group consisting of SEQ ID NO: 36, SEQ ID NO: 40, and SEQ ID NO: 48, or
a variable heavy chain comprising CDRS as set forth in an amino acid sequence selected from the group consisting of SEQ ID NO: 32, SEQ ID NO: 44, SEQ ID NO: 52.

24. The antibody, or antigen-binding portion thereof, of claim 23, which dissociates from IL-1α with a K_{D} selected from the group consisting of 3.0×10⁻⁷ M or less; 1.1×10⁻⁷ M or less; 6×10⁻⁸ M or less; 4.2×10⁻⁸ M or less; 1×10⁻⁸ M or less; 1×10⁻⁹ M or less.

25. The antibody, or antigen-binding portion thereof, of claim 23, wherein the isolated antibody, or antigen-binding portion thereof, dissociates from human IL-1α with a K_{D} of 1×10⁻⁷ M or less and neutralizes human IL-1α in a standard in vitro assay with an ND₅₀ of 900 nM or less.

26-28. (canceled)

29. The isolated antibody, or an antigen-binding portion thereof, of claim 23, further comprising
variable light chain comprising CDRs as set forth in an amino acid sequence selected from the group consisting of SEQ ID NO: 12, SEQ ID NO: 24, and SEQ ID NO: 28, or
variable heavy chain comprising CDRS as set forth in an amino acid sequence selected from the group consisting of SEQ ID NO: 4, SEQ ID NO: 8, SEQ ID NO: 16, and SEQ ID NO: 20.

30. An isolated antibody, or an antigen-binding portion thereof, having dual-specificity for human IL-1α and human IL-1β, comprising
an IL-1α antigen binding region having either a light chain variable sequence comprising a CDR3 selected from the group consisting of SEQ ID NO: 1, SEQ ID NO: 23, and SEQ ID NO: 27 or a heavy chain variable sequence comprising a CDR3 selected from the group consisting of SEQ ID NO: 3, SEQ ID NO: 7, SEQ ID NO: 15, SEQ ID NO: 19, and
an IL-1β antigen binding region having either a light chain variable sequence comprising a CDR3 selected from the group consisting of SEQ ID NO: 35, SEQ ID NO: 39, and SEQ ID NO: 47 or a heavy chain variable sequence comprising a CDR3 selected from the group consisting of SEQ ID NO: 31, SEQ ID NO: 43, and SEQ ID NO: 51.

31. The antibody, or antigen-binding portion thereof, of claim 30, wherein the light chain variable sequence of the IL-1α antigen binding region further comprises a CDR2 selected from the group consisting of SEQ ID NO: 10, SEQ ID NO: 22, and SEQ ID NO: 26.

32. The antibody, or antigen-binding portion thereof, of claim 30, wherein the heavy chain variable sequence of the IL-1α antigen binding region further comprises a CDR2 selected from the group consisting of SEQ ID NO: 2, SEQ ID NO: 6, SEQ ID NO: 14, and SEQ ID NO: 18.

33. The antibody, or antigen-binding portion thereof, of claim 31, wherein the light chain variable sequence of the IL-1α antigen binding region further comprises a CDR1 selected from the group consisting of SEQ ID NO: 9, SEQ ID NO: 21, and SEQ ID NO: 25.

34. The antibody, or antigen-binding portion thereof, of claim 32, wherein the heavy chain variable sequence of the IL-1α antigen binding region further comprises a CDR1 selected from the group consisting of SEQ ID NO: 1, SEQ ID NO: 5, SEQ ID NO: 13, and SEQ ID NO: 17.

35. The antibody, or antigen-binding portion thereof, of claim 30, wherein the light chain variable sequence of the IL-1β antigen binding region further comprises a CDR2 selected from the group consisting of SEQ ID NO: 34, SEQ ID NO: 38, and SEQ ID NO: 46.

36. The antibody, or antigen-binding portion thereof, of claim 30, wherein the heavy chain variable sequence of the IL-1α antigen binding region further comprises a CDR2 selected from the group consisting of SEQ ID NO: 30, SEQ ID NO: 43, and SEQ ID NO: 50.

37. The antibody, or antigen-binding portion thereof, of claim 35, wherein the light chain variable sequence of the IL-1α antigen binding region further comprises a CDR1 selected from the group consisting of SEQ ID NO: 33, SEQ ID NO: 37, and SEQ ID NO: 45.

38. The antibody, or antigen-binding portion thereof, of claim 36, wherein the heavy chain variable sequence of the IL-1α antigen binding region further comprises a CDR1 selected from the group consisting of SEQ ID NO: 29, SEQ ID NO: 41, and SEQ ID NO: 49.

39. A dual-specific, isolated antibody, or antigen-binding portion thereof, comprising an IL-1α antigen binding region and an IL-1β antigen binding region, wherein the antibody, or antigen-binding portion thereof, comprises a heavy chain variable region and a light chain variable region combination selected from the group consisting of
a) a heavy chain variable region comprising CDRs as set forth in SEQ ID NO: 16 (ABT1-96) and a light chain variable region comprising CDRs as set forth in SEQ ID NO: 40 (ABT2-46);
b) light chain variable region comprising CDRs as set forth in SEQ ID NO: 24 (ABT1-122) and a heavy chain variable region comprising CDRs as set forth in SEQ ID NO: 52 (ABT2-108);
c) a light chain variable region comprising CDRs as set forth in SEQ ID NO: 28 (ABT1-141) and a heavy chain variable region comprising CDRs as set forth in SEQ ID NO: 52 (ABT2-108);
d) a light chain variable region comprising CDRs as set forth in SEQ ID NO: 28 (ABT1-141) and a heavy chain variable region comprising CDRs as set forth in SEQ ID NO: 44 (ABT2-65);
e) a heavy chain variable region comprising CDRs as set forth in SEQ ID NO: 16 (ABT1-96) and a light chain variable region comprising CDRs as set forth in SEQ ID NO: 36 (ABT2-42);
f) a light chain variable region comprising CDRs as set forth in SEQ ID NO: 12 (ABT1-95) and a heavy chain variable region comprising CDRs as set forth in SEQ ID NO: 32 (ABT2-13);
g) a light chain variable region comprising CDRs as set forth in SEQ ID NO: 24 (ABT1-122) and a heavy chain variable region comprising CDRs as set forth in SEQ ID NO: 44 (ABT2-65); and
h) a heavy chain variable region comprising CDRs as set forth in SEQ ID NO: 20 (ABT1-98) and a light chain variable region comprising CDRs as set forth in SEQ ID NO: 48 (ABT2-76).

40. The antibody, or antigen-binding portion of claim 1, which has an IgG1 or an IgG4 heavy chain constant region.

41. The antibody, or antigen-binding portion of claim 1, which is an antibody fragment selected from the group consisting of a Fab, a Fab′, a Fab₂, a Fab′₂, an Fd, an Fd′, a single chain Fv (scFv), an scFvₐ, and a domain antibody (dAb).

42. The antibody, or antigen-binding portion of claim 1, wherein the antibody, or antigen-binding portion thereof, is human.

43. A pharmaceutical composition comprising the antibody, or antigen-binding portion thereof, of claim 1 and a pharmaceutically acceptable carrier.

44. The pharmaceutical composition of claim 43, which further comprises at least one additional therapeutic agent for treating a disorder in which IL-1α/IL-1β activity is detrimental.

45. A method for inhibiting human IL-1α/IL-1β activity comprising contacting human IL-1α and IL-1β with the antibody, or antigen-binding portion thereof, of claim 1 such that human IL-1α/IL-1β activity is inhibited.

46. A method for inhibiting human IL-1α/IL-1β activity in a human subject suffering from a disorder in which IL-1α/IL-1β activity is detrimental, comprising administering to the human subject the antibody, or antigen-binding portion thereof, of claim 1 such that human IL-1α/IL-1β activity in the human subject is inhibited.

47. The method of claim 46, wherein the disorder in which IL-1α/IL-1β activity is detrimental is selected from the group consisting of an autoimmune disease, an intestinal disorder, a skin disorder, a neurological disorder, and a metabolic disorder.

48. The method of claim 46, wherein the disorder in which IL-1α/IL-1β activity is detrimental is selected from the group consisting of rheumatoid arthritis, Crohn's disease, multiple sclerosis, insulin dependent diabetes, mellitus, and psoriasis.

49. The method of claim 48, wherein the antibody, or antigen binding portion thereof, is administered to the subject with an additional therapeutic agent.

50. A single domain antibody (dAb) comprising an amino acid sequence selected from the group consisting of SEQ ID NO: 4, SEQ ID NO: 8, SEQ ID NO: 12, SEQ ID NO: 16, SEQ ID NO: 20, SEQ ID NO: 24, SEQ ID NO: 28, SEQ ID NO: 32, SEQ ID NO: 36, SEQ ID NO: 40, SEQ ID NO: 44, SEQ ID NO: 48, SEQ ID NO: 52, SEQ ID NO: 53, SEQ ID NO: 54, SEQ ID NO: 55, SEQ ID NO: 56, SEQ ID NO: 57, SEQ ID NO: 58, SEQ ID NO: 59, SEQ ID NO: 60, SEQ ID NO: 61, SEQ ID NO: 62, SEQ ID NO: 63 SEQ ID NO: 64, SEQ ID NO: 65, SEQ ID NO: 66, SEQ ID NO: 67, SEQ ID NO: 68, SEQ ID NO: 69, SEQ ID NO: 70, SEQ ID NO: 71, SEQ ID NO: 72, SEQ ID NO: 73, SEQ ID NO: 74, SEQ ID NO: 75, SEQ ID NO: 76, SEQ ID NO: 77, SEQ ID NO: 78, SEQ ID NO: 79, SEQ ID NO: 80, SEQ ID NO: 81, SEQ ID NO: 82, SEQ ID NO: 83, SEQ ID NO: 84, SEQ ID NO: 85, SEQ ID NO: 86, SEQ ID NO: 87, SEQ ID NO: 88, SEQ ID NO: 89, SEQ ID NO: 90, SEQ ID NO: 91, SEQ ID NO: 92, SEQ ID NO: 93, SEQ ID NO: 94, SEQ ID NO: 95, SEQ ID NO: 96, SEQ ID NO: 97, SEQ ID NO: 98, SEQ ID NO: 99, SEQ ID NO: 100, SEQ ID NO: 101, SEQ ID NO: 102, SEQ ID NO: 103, SEQ ID NO: 104, SEQ ID NO: 105, SEQ ID NO: 106, SEQ ID NO: 107, SEQ ID NO: 108, SEQ ID NO: 109, SEQ ID NO: 110, SEQ ID NO: 111, SEQ ID NO: 112, SEQ ID NO: 113, SEQ ID NO: 114, SEQ ID NO: 115, SEQ ID NO: 116, SEQ ID NO: 117, SEQ ID NO: 118, SEQ ID NO: 119, SEQ ID NO: 120, SEQ ID NO: 121, SEQ ID NO: 122, SEQ ID NO: 123, SEQ ID NO: 124, SEQ ID NO: 125, SEQ ID NO: 126, SEQ ID NO: 127, SEQ ID NO: 128, SEQ ID NO: 129, SEQ ID NO: 130, SEQ ID NO: 131, SEQ ID NO: 132, and SEQ ID NO: 133.

51. An isolated nucleic acid encoding a light chain CDR3 domain selected from the group consisting of SEQ ID NO: 11, SEQ ID NO: 23, and SEQ ID NO: 27.

52. The isolated nucleic acid of claim 51, which encodes an antibody light chain variable region.

53. The isolated nucleic acid of claim 52, which further comprises
a) a CDR2 domain selected from the group consisting of SEQ ID NO: 10, SEQ ID NO: 22, and SEQ ID NO: 26;
b) a CDR1 domain selected from the group consisting of SEQ ID NO: 9, SEQ ID NO: 21, and SEQ ID NO: 25; or
c) a combination of a) and b).

54. (canceled)

55. An isolated nucleic acid encoding a heavy chain CDR3 domain selected from the group consisting of SEQ ID NO: 3, SEQ ID NO: 7, SEQ ID NO: 15, and SEQ ID NO: 19.

56. The isolated nucleic acid of claim 55, which encodes an antibody heavy chain variable region.

57. The isolated nucleic acid of claim 56, which further comprises
a) a CDR2 domain selected from the group consisting of SEQ ID NO: 2, SEQ ID NO: 6, SEQ ID NO: 14, and SEQ ID NO: 18;
b) a CDR1 domain selected from the group consisting of SEQ ID NO: 1, SEQ ID NO: 5, SEQ ID NO: 13, and SEQ ID NO: 17; or
c) a combination of a) and b).

58. (canceled)

59. An isolated nucleic acid encoding a light chain CDR3 domain selected from the group consisting of SEQ ID NO: 35, SEQ ID NO: 39, and SEQ ID NO: 47.

60. The isolated nucleic acid of claim 59, which encodes an antibody light chain variable region.

61. The isolated nucleic acid of claim 60, which further comprises
a) a CDR2 domain selected from the group consisting of SEQ ID NO: 34, SEQ ID NO: 38, and SEQ ID NO: 46;
b) a CDR1 domain selected from the group consisting of SEQ ID NO: 33, SEQ ID NO: 37, and SEQ ID NO: 45; or
c) a combination of a) and b).

62. (canceled)

63. An isolated nucleic acid encoding a heavy chain CDR3 domain selected from the group consisting of SEQ ID NO: 31, SEQ ID NO: 43, and SEQ ID NO: 51.

64. The isolated nucleic acid of claim 63, which encodes an antibody heavy chain variable region.

65. The isolated nucleic acid of claim 64, which further comprises
a) a CDR2 domain selected from the group consisting of SEQ ID NO: 30, SEQ ID NO: 42, and SEQ ID NO: 50;
b) a CDR1 domain selected from the group consisting of SEQ ID NO: 29, SEQ ID NO: 41, and SEQ ID NO: 49; or
c) a combination of a) and b).

66. (canceled)

67. An isolated nucleic acid encoding an antibody light chain variable region comprising the amino acid sequence selected from the group consisting of SEQ ID NO: 12, SEQ ID NO: 24, SEQ ID NO: 28, SEQ ID NO: 36, SEQ ID NO: 40, SEQ ID NO: 48, SEQ ID NO: 94, SEQ ID NO: 95, SEQ ID NO: 96, SEQ ID NO: 97, SEQ ID NO: 98, SEQ ID NO: 99, SEQ ID NO: 100, SEQ ID NO: 101, SEQ ID NO: 102, SEQ ID NO: 103, SEQ ID NO: 104, SEQ ID NO: 105, SEQ ID NO: 106, SEQ ID NO: 107, SEQ ID NO: 108, SEQ ID NO: 109, SEQ ID NO: 110, SEQ ID NO: 111, SEQ ID NO: 112, SEQ ID NO: 113, SEQ ID NO: 114, SEQ ID NO: 115, SEQ ID NO: 116, SEQ ID NO: 117, SEQ ID NO: 118, SEQ ID NO: 119, SEQ ID NO: 120, SEQ ID NO: 121, SEQ ID NO: 122, SEQ ID NO: 123, SEQ ID NO: 124, SEQ ID NO: 125, SEQ ID NO: 126, SEQ ID NO: 127, SEQ ID NO: 128, SEQ ID NO: 129, SEQ ID NO: 130, SEQ ID NO: 131, SEQ ID NO: 132, and SEQ ID NO: 133.

68. An isolated nucleic acid encoding an antibody heavy chain variable region comprising the amino acid sequence selected from the group consisting of SEQ ID NO: 4, SEQ ID NO 8, SEQ ID NO: 16, SEQ ID NO: 20, SEQ ID NO: 32, SEQ ID NO: 44, SEQ ID NO: 52, SEQ ID NO: 54, SEQ ID NO: 55, SEQ ID NO: 56, SEQ ID NO: 57, SEQ ID NO: 58, SEQ ID NO: 59, SEQ ID NO: 60, SEQ ID NO: 61, SEQ ID NO: 62, SEQ ID NO: 63 SEQ ID NO: 64, SEQ ID NO: 65, SEQ ID NO: 66, SEQ ID NO: 67, SEQ ID NO: 68, SEQ ID NO: 69, SEQ ID NO: 70, SEQ ID NO: 71, SEQ ID NO: 72, SEQ ID NO: 73, SEQ ID NO: 74, SEQ ID NO: 75, SEQ ID NO: 76, SEQ ID NO: 77, SEQ ID NO: 78, SEQ ID NO: 79, SEQ ID NO: 80, SEQ ID NO: 81, SEQ ID NO: 82, SEQ ID NO: 83, SEQ ID NO: 84, SEQ ID NO: 85, SEQ ID NO: 86, SEQ ID NO: 87, SEQ ID NO: 88, SEQ ID NO: 89, SEQ ID NO: 90, SEQ ID NO: 91, and SEQ ID NO: 92.

69. An isolated nucleic acid selected from the group consisting of SEQ ID NO: 134 to SEQ ID NO: 843.

70. A recombinant expression vector comprising a nucleic acid of claim 67.

71. A polypeptide comprising an amino acid sequence encoded by a nucleic acid sequence selected from the group consisting of SEQ ID NO: 134 to SEQ ID NO: 843.

72. An expression vector comprising:
a) an episomal origin of replication;
b) an insertion site for inserting a nucleic acid sequence encoding a gene of interest;
c) a stuffer sequence at the insertion site; and
d) a nucleic acid encoding an antibody heavy or light chain constant region.

73-77. (canceled)

78. The expression vector of claim 72, comprising a sequence selected from the group consisting of SEQ ID NO: 844, SEQ ID NO: 845, SEQ ID NO: 846, SEQ ID NO: 847, SEQ ID NO: 848, SEQ ID NO: 849, SEQ ID NO: 850, SEQ ID NO: 851, SEQ ID NO: 852, SEQ ID NO: 853, SEQ ID NO: 854, and SEQ ID NO: 855.

79. A host cell into which the recombinant expression vector of claim 72 has been introduced.

80. A method of synthesizing a human antibody that binds human IL-1α and IL-1β comprising culturing the host cell of claim 78 in a culture medium until a human antibody that binds human IL-1α and IL-1β is synthesized by the cell.

81. A pharmaceutical composition comprising the antibody, or antigen-binding portion thereof, of claim 15 and a pharmaceutically acceptable carrier.

82. A pharmaceutical composition comprising the antibody, or antigen-binding portion thereof, of claim 23 and a pharmaceutically acceptable carrier.

83. A pharmaceutical composition comprising the antibody, or antigen-binding portion thereof, of claim 30 and a pharmaceutically acceptable carrier.

84. A pharmaceutical composition comprising the antibody, or antigen-binding portion thereof, of claim 39 and a pharmaceutically acceptable carrier.

85. A method for inhibiting human IL-1α/IL-1β activity comprising contacting human IL-1α and IL-1β with the antibody, or antigen-binding portion thereof, of claim 15 such that human IL-1α/IL-1β activity is inhibited.

86. A method for inhibiting human IL-1α/IL-1β activity comprising contacting human IL-1α and IL-1β with the antibody, or antigen-binding portion thereof, of claim 23 such that human IL-1α/IL-1β activity is inhibited.

87. A method for inhibiting human IL-1α/IL-1β activity comprising contacting human IL-1α and IL-1β with the antibody, or antigen-binding portion thereof, of claim 30 such that human IL-1α/IL-1β activity is inhibited.

88. A method for inhibiting human IL-1α/IL-1β activity comprising contacting human IL-1α and IL-1β with the antibody, or antigen-binding portion thereof, of claim 39 such that human IL-1α/IL-1β activity is inhibited.

89. A method for inhibiting human IL-1α/IL-1β activity in a human subject suffering from a disorder in which IL-1α/IL-1β activity is detrimental, comprising administering to the human subject the antibody, or antigen-binding portion thereof, of claim 15 such that human IL-1α/IL-1β activity in the human subject is inhibited.

90. A method for inhibiting human IL-1α/IL-1β activity in a human subject suffering from a disorder in which IL-1α/IL-1β activity is detrimental, comprising administering to the human subject the antibody, or antigen-binding portion thereof, of claim 23 such that human IL-1α/IL-1β activity in the human subject is inhibited.

91. A method for inhibiting human IL-1α/IL-1β activity in a human subject suffering from a disorder in which IL-1α/IL-1β activity is detrimental, comprising administering to the human subject the antibody, or antigen-binding portion thereof, of claim 30 such that human IL-1α/IL-1β activity in the human subject is inhibited.

92. A method for inhibiting human IL-1α/IL-1β activity in a human subject suffering from a disorder in which IL-1α/IL-1β activity is detrimental, comprising administering to the human subject the antibody, or antigen-binding portion thereof, of claim 39 such that human IL-1α/IL-1β activity in the human subject is inhibited.

93. A recombinant expression vector comprising a nucleic acid of claim 68.

94. A recombinant expression vector comprising a nucleic acid of claim 69.

The application's sequence listing, which the Patent Office published only in electronic form, follows.

SEQUENCE LISTING (1158 sequences)

SEQ ID NO: 1 - protein, 6 aa, Artificial Sequence
  Chemically synthesized CDR1 ABT1-6-23 (VH)
VRYDMA

SEQ ID NO: 2 - protein, 16 aa, Artificial Sequence
  Chemically synthesized CDR2 ABT1-6-23 (VH)
SIYKSGALTSYDSVKG

SEQ ID NO: 3 - protein, 7 aa, Artificial Sequence
  Chemically synthesized CDR3 ABT1-6-23 (VH)
GWASFDY

SEQ ID NO: 4 - protein, 115 aa, Artificial Sequence
  Chemically synthesized ABT1-6-23 (VH)
EVQLLESGGGLVQPGGSLRLSCAASGFTFVRYDMAWVRQAPGKGLEWVSSIYKSGALTSYDSVKGRFTISRDNSKNTLYLQMNSLRAEDTAVYYCAKGWASFDYWGQGTLVTVSS

SEQ ID NO: 5 - protein, 5 aa, Artificial Sequence
  Chemically synthesized CDR1 ABT1-86
RYIMA

SEQ ID NO: 6 - protein, 17 aa, Artificial Sequence
  Chemically synthesized CDR2 ABT1-86
SITPSGAATYYADSVKG

SEQ ID NO: 7 - protein, 13 aa, Artificial Sequence
  Chemically synthesized CDR3 ABT1-86
EPADRYSTWTFDY

SEQ ID NO: 8 - protein, 122 aa, Artificial Sequence
  Chemically synthesized ABT1-86(VH)
EVQLLESGGGLVQPGGSLRLSCAASGFTFDRYIMAWVRQAPGKGLEWVSSITPSGAATYYADSVKGRFTISRDNSKNTLYLQMNSLRAEDTAVYYCAEEPADRYSTWTFDYWGQGTLVTVSS

SEQ ID NO: 9 - protein, 11 aa, Artificial Sequence
  Chemically synthesized CDR1 ABT1-95
RASQPIHGNLR

SEQ ID NO: 10 - protein, 7 aa, Artificial Sequence
  Chemically synthesized CDR2 ABT1-95
NISNLQS

SEQ ID NO: 11 - protein, 9 aa, Artificial Sequence
  Chemically synthesized CDR3 ABT1-95
QQGYRWPVT

SEQ ID NO: 12 - protein, 108 aa, Artificial Sequence
  Chemically synthesized ABT1-95 Vk
DIQMTQSPSSLSASVGDRVTITCRASQPIHGNLRWYQQKPGKAPKLLIYNISNLQSGVPSRFSGSGSGTDFTLTISSLQPEDFATYYCQQGYRWPVTFGQGTKVEIKR

SEQ ID NO: 13 - protein, 5 aa, Artificial Sequence
  Chemically synthesized CDR1 ABT1-96
QYNMF

SEQ ID NO: 14 - protein, 16 aa, Artificial Sequence
  Chemically synthesized CDR2 ABT1-96
VISGSGRFTYADSVKG

SEQ ID NO: 15 - protein, 11 aa, Artificial Sequence
  Chemically synthesized CDR3 ABT1-96
GWWRRDPPFDY

SEQ ID NO: 16 - protein, 119 aa, Artificial Sequence
  Chemically synthesized ABT1-96 VH
EVQLLESGGGLVQPGGSLRLSCAASGFTFNQYNMFWVRQAPGKGLEWVSVISGSGRFTYADSVKGRFTISRDNSKNTLYLQMNSLRAEDTAVYYCAKGWWRRDPPFDYWGQGTLVTVSS

SEQ ID NO: 17 - protein, 5 aa, Artificial Sequence
  Chemically synthesized CDR1 ABT1-98
GYIMS

SEQ ID NO: 18 - protein, 17 aa, Artificial Sequence
  Chemically synthesized CDR2 ABT1-98
TISPLGSVTYYADSVKG

SEQ ID NO: 19 - protein, 7 aa, Artificial Sequence
  Chemically synthesized CDR3 ABT1-98
KGPWFDY

SEQ ID NO: 20 - protein, 116 aa, Artificial Sequence
  Chemically synthesized ABT1-98 VH
EVQLLESGGGLVQPGGSLRLSCAASGFTFDGYIMSWVRQAPGKGLEWVSTISPLGSVTYYADSVKGRFTISRDNSKNTLYLQMNSLRAEDTAVYYCAKKGPWFDYWGQGTLVTVSS

SEQ ID NO: 21 - protein, 11 aa, Artificial Sequence
  Chemically synthesized CDR1 ABT1-122
RASQPIWTELN

SEQ ID NO: 22 - protein, 7 aa, Artificial Sequence
  Chemically synthesized CDR2 ABT1-122
GSSSLQS

SEQ ID NO: 23 - protein, 9 aa, Artificial Sequence
  Chemically synthesized CDR3 ABT1-122
QQFAYFPAT

SEQ ID NO: 24 - protein, 107 aa, Artificial Sequence
  Chemically synthesized ABT1-122 Vk
DIQMTQSPSSLSASVGDRVTITCRASQPIWTELNWYQQKPGKAPKLLIYGSSSLQSGVPRFSGSGSGTDFTLTISSLQPEDFATYYCQQFAYFPATFGQGTKVEIKR

SEQ ID NO: 25 - protein, 11 aa, Artificial Sequence
  Chemically synthesized CDR1 ABT1-141
RASQWIQKQLA

SEQ ID NO: 26 - protein, 7 aa, Artificial Sequence
  Chemically synthesized CDR2 ABT1-141
SSSYLQS

SEQ ID NO: 27 - protein, 9 aa, Artificial Sequence
  Chemically synthesized CDR3 ABT1-141
QQHLRVPFT

SEQ ID NO: 28 - protein, 107 aa, Artificial Sequence
  Chemically synthesized ABT1-141 Vk
DIQMTQSPSSLSASVGDRVTITCRASQWIQKQLAWYQQKPGKAPKLLIYSSSYLQSGVPRFSGSGSGTDFTLTISSLQPEDFATYYCQQHLRVPFTFGQGTKVEIKR

SEQ ID NO: 29 - protein, 5 aa, Artificial Sequence
  Chemically synthesized CDR1 ABT2-13
DYVMY

SEQ ID NO: 30 - protein, 17 aa, Artificial Sequence
  Chemically synthesized CDR2 ABT2-13
RIDPMGSSTYYADSVKG

SEQ ID NO: 31 - protein, 7 aa, Artificial Sequence
  Chemically synthesized CDR3 ABT2-13
PEGNFDY

SEQ ID NO: 32 - protein, 116 aa, Artificial Sequence
  Chemically synthesized ABT2-13 VH
EVQLLESGGGLVQPGGSLRLSCAASGFTFRDYVMYWARQAPGKGLEWVSRIDPMGSSTYYADSVKGRFTISRDNSKNTLYLQMNSLRAEDTAVYYCAKPEGNFDYWGQGTLVTVSS

SEQ ID NO: 33 - protein, 11 aa, Artificial Sequence
  Chemically synthesized CDR1 ABT2-42
RASQYIEKWLT

SEQ ID NO: 34 - protein, 7 aa, Artificial Sequence
  Chemically synthesized CDR2 ABT2-42
RGSLLQS

SEQ ID NO: 35 - protein, 9 aa, Artificial Sequence
  Chemically synthesized CDR3 ABT2-42
QQTEYWPFT

SEQ ID NO: 36 - protein, 107 aa, Artificial Sequence
  Chemically synthesized ABT2-42 Vk
DIQMTQSPSSLSASVGDRVTITCRASQYIEKWLTWYQQKPGKAPTLLIYRGSLLQSGVPRFSGSGSGTDFTLTISSLQPEDFATYYCQQTEYWPFTFGQGTKVEIKR

SEQ ID NO: 37 - protein, 11 aa, Artificial Sequence
  Chemically synthesized CDR1 ABT2-46
RASQSIIEWLS

SEQ ID NO: 38 - protein, 7 aa, Artificial Sequence
  Chemically synthesized CDR2 ABT2-46
RTSVLQS

SEQ ID NO: 39 - protein, 9 aa, Artificial Sequence
  Chemically synthesized CDR3 ABT2-46
QQNEFWPFT

SEQ ID NO: 40 - protein, 108 aa, Artificial Sequence
  Chemically synthesized ABT2-46n Vk
DIQMTQSPSSLSASVGDRVTITCRASQSIIEWLSWYQQKPGKAPKLLIYRTSVLQSGVPSRFSGSGSGTDFTLTISSLQPEDFATYYCQQNEFWPFTFGQGTKVEIKR

SEQ ID NO: 41 - protein, 5 aa, Artificial Sequence
  Chemically synthesized CDR1 ABT2-65
DYQMG

SEQ ID NO: 42 - protein, 17 aa, Artificial Sequence
  Chemically synthesized CDR2 ABT2-65
SISAMGNRTYYADSVKG

SEQ ID NO: 43 - protein, 14 aa, Artificial Sequence
  Chemically synthesized CDR3 ABT2-65
NLVRTQSKMWMFDY

SEQ ID NO: 44 - protein, 123 aa, Artificial Sequence
  Chemically synthesized ABT2-65 VH
EVQLLESGGGLVQPGGSLRLSCAASGFTFEDYQMGWVRQAPGKGLEWVSSISAMGNRTYYADSVKGRFTISRDDSKNTLYLQMNSLRAEDTAVYYCAKNLVRTQSKMWMFDYWGQGTLVTVSS

SEQ ID NO: 45 - protein, 11 aa, Artificial Sequence
  Chemically synthesized CDR1 ABT2-76
RASQSIDRWLA

SEQ ID NO: 46 - protein, 7 aa, Artificial Sequence
  Chemically synthesized CDR2 ABT2-76
RGSILQS

SEQ ID NO: 47 - protein, 9 aa, Artificial Sequence
  Chemically synthesized CDR3 ABT2-76
QQVAFWPPT

SEQ ID NO: 48 - protein, 108 aa, Artificial Sequence
  Chemically synthesized ABT2-76 Vk
DIQMTQSPSSLSASVGDRVTITCRASQSIDRWLAWYQQKPGKAPKLLIYRGSILQSGVPSRFSGSGSGTDFTLTISSLQPEDFATYYCQQVAFWPPTFGQGTKVEIKR

SEQ ID NO: 49 - protein, 5 aa, Artificial Sequence
  Chemically synthesized CDR1 ABT2-108
EYTMM

SEQ ID NO: 50 - protein, 17 aa, Artificial Sequence
  Chemically synthesized CDR2 ABT2-108
RIGQDGKNTYYADSVKG

SEQ ID NO: 51 - protein, 13 aa, Artificial Sequence
  Chemically synthesized CDR3 ABT2-108
YTGRVGVHHLFDY

SEQ ID NO: 52 - protein, 121 aa, Artificial Sequence
  Chemically synthesized ABT2-108 Vh
EVQLLESGGGLVQPGGSLRLSCAASGFTFAEYTMMWVRQAPGKGLEWVSRIGQDGKNTYYADSVKGRFTISRDNSKNTLYLQMNSLRAEDTAVYYCAKYTGRVGVHHLFDYWGQGTLVTSS

SEQ ID NO: 53 - protein, 116 aa, Artificial Sequence
  Chemically synthesized VH Dummy
EVQLLESGGGLVQPGGSLRLSCAASGFTFSSYAMSWVRQAPGKGLEWVSAISGSGGSTYYADSVKGRFTISRDNSKNTLYLQMNSLRAEDTAVYYCAKSYGAFDYWGQGTLVTVSS

SEQ ID NO: 54 - protein, 120 aa, Artificial Sequence
  Chemically synthesized ABT1-207
EVQLLESGGGLIQPGGSLRLSCAASGFTFGRYYMSWVRQAPGKGLEWVSSIDYLGTNTYYADSVKGRFTISRDNSKNTLYLQMNSLRAEDTAVYYCAKLTRIRPPNFDYWGQGTLVTVSS

SEQ ID NO: 55 - protein, 116 aa, Artificial Sequence
  Chemically synthesized ABT1-6
EVQLLESGGGLVQPGGSLRLSCAASGFTFGAYDMQWVRQAPGKGLEWVSSINKSGALTSYADSVKGRFTISRDNSKNTLYLQMNSLRAEDTAVYYCAKGWASFDYWGQGTLVTVSS

SEQ ID NO: 56 - protein, 116 aa, Artificial Sequence
  Chemically synthesized ABT1-6-15
EVQLLESGGGLVQPGGSLRLSCAASGFTFVRYDMAWVRQAPGKGLEWVSSINKSGALTSYADSVKGRFTISRDNSKNTLYLQMNSLRAEDTAVYYCAKGWASFDYWGQGTLVTVSS

SEQ ID NO: 57 - protein, 116 aa, Artificial Sequence
  Chemically synthesized ABT1-6-3
EVQLLESGGGLVQPGGSLRLSCAASGFTFGAYDMQWVRQAPGKGLEWVSSIYKSGALTSYADSVKGRFTISRDNSKNTLYLQMNSLRAEDTAVYYCAKGWASFDYWGQGTLVTVSS

SEQ ID NO: 58 - protein, 120 aa, Artificial Sequence
  Chemically synthesized ABT2-10
EVQLLESGGGLVQPGGSLRLSCTASGFTFNRYNMAWARQAPGKGLEWVSEIDLKGSQTYYADSVKGRFTISRDNSKNTLYLQMNSLRAEDTAVYYCAKVSISAYHMFDYWGQGTLVTVSS

SEQ ID NO: 59 - protein, 122 aa, Artificial Sequence
  Chemically synthesized ABT2-108-504
EVQLLESGGGLVQPGGSLRLSCAASGFTFADEGMMWVRQAPGKGLEWVSRIGQDGKNTYYADSVKGRFTISRDNSKNTLYLQMNSLRAEDTAVYYCAKYTGRVGVHHLFDYWGQGTLVTVSS

SEQ ID NO: 60 - protein, 122 aa, Artificial Sequence
  Chemically synthesized ABT2-108-509
EVQLLESGGGLVQPGGSLRLSCAASGFTFAEYTMMWVRQAPGKGLEWVSRITYSGKNTYYADSVKGRFTISRDNSKNTLYLQMNSLRAEDTAVYYCAKYTGRVGVHHLFDYWGQGTLVTVSS

SEQ ID NO: 61 - protein, 122 aa, Artificial Sequence
  Chemically synthesized ABT2-108-511
EVQLLESGGGLVQPGGSLRLSCAASGFTFAEYTMMWVRQAPGKGLEWVSRIGQDGKNTVIRDSVKGRFTISRDNSKNTLYLQMNSLRAEDTAVYYCAKYTGRVGVHHLFDYWGQGTLVTVSS

SEQ ID NO: 62 - protein, 122 aa, Artificial Sequence
  Chemically synthesized ABT2-108-512(=611)
EVQLLESGGGLVQPGGSLRLSCAASGFTFAEYTMMWVRQAPGKGLEWVSRIGQDGKNTYVLRSVKGRFTISRDNSKNTLYLQMNSLRAEDTAVYYCAKYTGRVGVHHLFDYWGQGTLVTVSS

SEQ ID NO: 63 - protein, 122 aa, Artificial Sequence
  Chemically synthesized ABT2-108-518
EVQLLESGGGLVQPGGSLRLSCAASGFTFAEYTMMWVRQAPGKGLEWVSRIGQDGKNTYYRMDVKGRFTISRDNSKNTLYLQMNSLRAEDTAVYYCAKYTGRVGVHHLFDYWGQGTLVTVSS

SEQ ID NO: 64 - protein, 122 aa, Artificial Sequence
  Chemically synthesized ABT2-108-521
EVQLLESGGGLVQPGGSLRLSCAASGFTFAEYTMMWVRQAPGKGLEWVSRIGQDGKNTYYADSVKGRFTISRDNSKNTLYLQMNSLRAEDTAVYYCAKYTGRILGHHLFDYWGQGTLVTVSS

SEQ ID NO: 65 - protein, 122 aa, Artificial Sequence
  Chemically synthesized ABT2-108-524
EVQLLESGGGLVQPGGSLRLSCAASGFTFAEYTMMWVRQAPGKGLEWVSRIGQDGKNTYYADSVKGRFTISRDNSKNTLYLQMNSLRAEDTAVYYCAKYTGRVFNHHLFDYWGQGTLVTVSS

SEQ ID NO: 66 - protein, 122 aa, Artificial Sequence
  Chemically synthesized ABT2-108-527
EVQLLESGGGLVQPGGSLRLSCAASGFTFAEYTMMWVRQAPGKGLEWVSRIGQDGKNTYYADSVKGRFTISRDNSKNTLYLQMNSLRAEDTAVYYCAKYTGRVFKHHLFDYWGQGTLVTVSS

SEQ ID NO: 67 - protein, 122 aa, Artificial Sequence
  Chemically synthesized ABT2-108-533x
EVQLLESGGGLVQPGGSLRLSCAASGFTFADEGMMWVRQAPGKGLEWVSRIGQDGKNTYYADSVKGRFTISRDNSKNTLYLQMNSLRAEDTAVYYCAKYTGRILGHHLFDYWGQGTLVTVSS

SEQ ID NO: 68 - protein, 122 aa, Artificial Sequence
  Chemically synthesized ABT2-108-534x
EVQLLESGGGLVQPGGSLRLSCAASGFTFADEGMMWVRQAPGKGLEWVSRITYSGKNTYYADSVKGRFTISRDNSKNTLYLQMNSLRAEDTAVYYCAKYTGRIFSHHLFDYWGQGTLVTVSS

SEQ ID NO: 69 - protein, 122 aa, Artificial Sequence
  Chemically synthesized ABT2-108-537x
EVQLLESGGGLVQPGGSLRLSCAASGFTFADEGMMWVRQAPGKGLEWVSRIGQDGKNTYYRMDVKGRFTISRDNSKNTLYLQMNSLRAEDTAVYYCAKYTGRILGHHLFDYWGQGTLVTVSS

SEQ ID NO: 70 - protein, 122 aa, Artificial Sequence
  Chemically synthesized ABT2-108-538x
EVQLLESGGGLVQPGGSLRLSCAASGFTFADEGMMWVRQAPGKGLEWVSRITYSGKNTYYADSVKGRFTISRDNSKNTLYLQMNSLRAEDTAVYYCAKYTGRILGHHLFDYWGQGTLVTVSS

SEQ ID NO: 71 - protein, 122 aa, Artificial Sequence
  Chemically synthesized ABT2-108-601
EVQLLESGGGLVQPGGSLRLSCAASGFTFAEESWMWVRQAPGKGLEWVSRIGQDGKNTYYADSVKGRFTISRDNSKNTLYLQMNSLRAEDTAVYYCAKYTGRVGVHHLFDYWGQGTLVTVSS

SEQ ID NO: 72 - protein, 122 aa, Artificial Sequence
  Chemically synthesized ABT2-108-602
EVQLLESGGGLVQPGGSLRLSCAASGFTFAEEKYMWVRQAPGKGLEWVSRIGQDGKNTYYADSVKGRFTISRDNSKNTLYLQMNSLRAEDTAVYYCAKYTGRVGVHHLFDYWGQGTLVTVSS

SEQ ID NO: 73 - protein, 122 aa, Artificial Sequence
  Chemically synthesized ABT2-108-603
EVQLLESGGGLVQPGGSLRLSCAASGFTFAEYTMMWVRQAPGKGLEWVSRITDAGKNTYYADSVKGRFTISRDNSKNTLYLQMNSLRAEDTAVYYCAKYTGRVGVHHLFDYWGQGTLVTVSS

SEQ ID NO: 74 - protein, 122 aa, Artificial Sequence
  Chemically synthesized ABT2-108-604
EVQLLESGGGLVQPGGSLRLSCAASGFTFAEYTMMWVRQAPGKGLEWVSRVTYDGKNTYYADSVKGRFTISRDNSKNTLYLQMNSLRAEDTAVYYCAKYTGRVGVHHLFDYWGQGTLVTVSS

SEQ ID NO: 75 - protein, 122 aa, Artificial Sequence
  Chemically synthesized ABT2-108-605
EVQLLESGGGLVQPGGSLRLSCAASGFTFAEYTMMWVRQAPGKGLEWVSRIGQDGKNTYYREDVKGRFTISRDNSKNTLYLQMNSLRAEDTAVYYCAKYTGRVGVHHLFDYWGQGTLVTVSS

SEQ ID NO: 76 - protein, 122 aa, Artificial Sequence
  Chemically synthesized ABT2-108-606
EVQLLESGGGLVQPGGSLRLSCAASGFTFAEYTMMWVRQAPGKGLEWVSRIGQDGKNTYYRSSVKGRFTISRDNSKNTLYLQMNSLRAEDTAVYYCAKYTGRVGVHHLFDYWGQGTLVTVSS

SEQ ID NO: 77 - protein, 122 aa, Artificial Sequence
  Chemically synthesized ABT2-108-607
EVQLLESGGGLVQPGGSLRLSCAASGFTFAEYTMMWVRQAPGKGLEWVSRIGQDGKNTYYRSDVKGRFTISRDNSKNTLYLQMNSLRAEDTAVYYCAKYTGRVGVHHLFDYWGQGTLVTVSS

SEQ ID NO: 78 - protein, 122 aa, Artificial Sequence
  Chemically synthesized ABT2-108-612
EVQLLESGGGLVQPGGSLRLSCAASGFTFAEYTMMWVRQAPGKGLEWVSRIGQDGKNTYYADSVKGRFTISRDNSKNTLYLQMNSLRAEDTAVYYCAKYTGRIMGHHLFDYWGQGTLVTVSS

SEQ ID NO: 79 - protein, 122 aa, Artificial Sequence
  Chemically synthesized ABT2-108-613
EVQLLESGGGLVQPGGSLRLSCAASGFTFAEYTMMWVRQAPGKGLEWVSRIGQDGKNTYYADSVKGRFTISRDNSKNTLYLQMNSLRAEDTAVYYCAKYTGRVFEHHLFDYWGQGTLVTVSS

SEQ ID NO: 80 - protein, 122 aa, Artificial Sequence
  Chemically synthesized ABT2-108-617
EVQLLESGGGLVQPGGSLRLSCAASGFTFAEYTMMWVRQAPGKGLEWVSRIGQDGKNTYYADSVKGRFTISRDNSKNTLYLQMNSLRAEDTAVYYCAKYTGRIFTHHLFDYWGQGTLVTVSS

SEQ ID NO: 81 - protein, 122 aa, Artificial Sequence
  Chemically synthesized ABT2-108-620S
EVQLLESGGGLVQPGGSLRLSCAASGFTFSEESWMWVRQAPGKGLEWVSRIGQDGKNTYYREDVKGRFTISRDNSKNTLYLQMNSLRAEDTAVYYCAKYTGRIMGHHLFDYWGQGTLVTVSS

SEQ ID NO: 82 - protein, 122 aa, Artificial Sequence
  Chemically synthesized ABT2-108-620x
EVQLLESGGGLVQPGGSLRLSCAASGFTFAEESWMWVRQAPGKGLEWVSRIGQDGKNTYYREDVKGRFTISRDNSKNTLYLQMNSLRAEDTAVYYCAKYTGRIMGHHLFDYWGQGTLVTVSS

SEQ ID NO: 83 - protein, 123 aa, Artificial Sequence
  Chemically synthesized ABT2-65-166
EVQLLESGGGLVQPGGSLRLSCAASGFTFEDYQMGWVRQAPGKGLEWVSSISAMGGRTYYADSVKGRFTISRDNSKNTLYLQMNSLRAEDTAVYYCAQNLVRLGRSRWMFDYWGQGTLVTVSS

SEQ ID NO: 84 - protein, 123 aa, Artificial Sequence
  Chemically synthesized ABT2-65-166S
EVQLLESGGGLVQPGGSLRLSCAASGFTFSDYQMGWVRQAPGKGLEWVSSISAMGGRTYYADSVKGRFTISRDNSKNTLYLQMNSLRAEDTAVYYCAQNLVRLGRSRWMFDYWGQGTLVTVSS

SEQ ID NO: 85 - protein, 123 aa, Artificial Sequence
  Chemically synthesized ABT2-65-166SK
EVQLLESGGGLVQPGGSLRLSCAASGFTFSDYQMGWVRQAPGKGLEWVSSISAMGGRTYYADSVKGRFTISRDNSKNTLYLQMNSLRAEDTAVYYCAKNLVRLGRSRWMFDYWGQGTLVTVSS

SEQ ID NO: 86 - protein, 123 aa, Artificial Sequence
  Chemically synthesized ABT2-65-17
EVQLLESGGGLVQPGGSLRLSCVASGFTFEDYQMGWVRQAPGKGLEWVSSISAMGNRTYYADSVKGRFTISRDDSKNTLYLQMNSLRAEDTAVYYCAQNLVRLGRSRWMFDYWGQGTLVTVSS

SEQ ID NO: 87 - protein, 123 aa, Artificial Sequence
  Chemically synthesized ABT2-65-201
EVQLLESGGGLVQPGGSLRLSCVASGFTFEDYQMGWVRQAPGKGLEWVSSISAMGRRTYYADSVKGRFTISRDNSKNTLYLQMNSLRAEDTAVYYCAQNLVRLGRSRWMFDYWGQGTLVTVSS

SEQ ID NO: 88 - protein, 123 aa, Artificial Sequence
  Chemically synthesized ABT2-65-203
EVQLLESGGGLVQPGGSLRLSCVASGFTFEDYQMGWVRQAPGKGLEWVSSISAMGFRTYYADSVKGRFTISRDNSKNTLYLQMNSLRAEDTAVYYCAQNLVRLGRSRWMFDYWGQGTLVTVSS

SEQ ID NO: 89 - protein, 123 aa, Artificial Sequence
  Chemically synthesized ABT2-65-8
EVQLLESGGGLVQPGGSLRLSCAASGFTFEDYQMGWVRQAPGKGLEWVSSISAMGNRTYYADSVKGRFTISRDDSKNTLYLQMNSLRAEDTAVYYCAQNLVRMDSRRWMFDYWGQGTLVTVSS

SEQ ID NO: 90 - protein, 123 aa, Artificial Sequence
  Chemically synthesized ABT2-65-B1
EVQLLESGGGLVQPGGSLRLSCVASGFTFEDYQMGWVRQAPGKGLEWVSSISAMGGRTYYADSVKGRFTISRDDSKNTLYLQMNSLRAEDTAVYYCAQNLVRLGRSRWMFDYWGQGTLVTVSS

SEQ ID NO: 91 - protein, 123 aa, Artificial Sequence
  Chemically synthesized ABT2-65-B2
EVQLLESGGGLVQPGGSLRLSCVASGFTFEDYQMGWVRQAPGKGLEWVSSISAMGRRTYYADSVKGRFTISRDDSKNTLYLQMNSLRAEDTAVYYCAQNLVRLGRSRWMFDYWGQGTLVTVSS

SEQ ID NO: 92 - protein, 123 aa, Artificial Sequence
  Chemically synthesized ABT2-65-B3
EVQLLESGGGLVQPGGSLRLSCVASGFTFEDYQMGWVRQAPGKGLEWVSSISAMGNRAYYADSVKGRFTISRDDSKNTLYLQMNSLRAEDTAVYYCAQNLVRLGRSRWMFDYWGQGTLVTVSS

SEQ ID NO: 93 - protein, 108 aa, Artificial Sequence
  Chemically synthesized Vk Dummy
DIQMTQSPSSLSASVGDRVTITCRASQSISSYLNWYQQKPGKAPKLLIYAASSLQSGVPSRFSGSGSGTDFTLTISSLQPEDFATYYCQQSYSTPNTFGQGTKVEIKR

SEQ ID NO: 94 - protein, 108 aa, Artificial Sequence
  Chemically synthesized ABT1-122-505
DIQMTQSPSSLSASVGDRVTITCRASQPIWTELNWYQQKPGKAPKLLIYGSSSLQSGVPSRFSGSGSGTDFTLTISSLQPEDFATYYCKQFAYFPATFGQGTKVEIKR

SEQ ID NO: 95 - protein, 108 aa, Artificial Sequence
  Chemically synthesized ABT1-122-508
DIQMTQSPSSLSASVGDRVTITCRASQPIWTELNWYQQKPGKAPKLLIYGSSSLQRGVPSRFSGSGSGTDFTLTISSLQPEDFATYYCQQFAYFPATFGQGTKVEIKR

SEQ ID NO: 96 - protein, 108 aa, Artificial Sequence
  Chemically synthesized ABT1-122-510
DIQMTQSPSSLSASVGDRVTITCRFSYPIWTELNWYQQKPGKAPKLLIYGSSSLQSGVPSRFSGSGSGTDFTLTISSLQPEDFATYYCQQFAYFPATFGQGTKVEIKR

SEQ ID NO: 97 - protein, 108 aa, Artificial Sequence
  Chemically synthesized ABT1-122-511
DIQMTQSPSSLSASVGDRVTITCRASQPIWTELNWYQQKPGKAPKLLIYGSSSLQRGVPSRFSGSGSGTDFTLTISSLQPEDFATYYCKQFAYFPATFGQGTKVEIKR

SEQ ID NO: 98 - protein, 108 aa, Artificial Sequence
  Chemically synthesized ABT1-122-512
DIQMTQSPSSLSASVGDRVTITCRASQPIWTELNWYQQKPGKAPKLLIYGSAKRQRGVPSRFSGSGSGTDFTLTISSLQPEDFATYYCKQFAYFPATFGQGTKVEIKR

SEQ ID NO: 99 - protein, 108 aa, Artificial Sequence
  Chemically synthesized ABT1-122-513
DIQMTQSPSSLSASVGDRVTITCRASQPIWTELNWYQQKPGKAPKLLIYGSGSRQRGVPSRFSGSGSGTDFTLTISSLQPEDFATYYCKQFAYFPATFGQGTKVEIKR

SEQ ID NO: 100 - protein, 108 aa, Artificial Sequence
  Chemically synthesized ABT1-122-551
DIQMTQSPSSLSASVGDRVTITCRAKFNIWTELNWYQQKPGKTPKLLIYGSSSLQSGVPSRFSGSGSGTDFTLTISSLQPEDFATYYCQQFAYFPATFGQGTKVEIKR

SEQ ID NO: 101 - protein, 108 aa, Artificial Sequence
  Chemically synthesized ABT1-122-552
DIQMTQSPSSLSASVGDRVTITCRASLGVWTELNWYQQKPGKAPKLLIYGSSSLQSGVPSRFSGSGSGTDFTLTISSLQPEDFATYYCQQFAYFPATFGQGTKVEIKR

SEQ ID NO: 102 - protein, 108 aa, Artificial Sequence
  Chemically synthesized ABT1-122-553
DIQMTQSPSSLSASVGDRVTITCRASQPIWTELKWYQQKPGKAPKLLIYGSSSLQSGVPSRFSGSGSGTDFTLTISSLQPEDFATYYCQQFAYFPATFGQGTKVEIKR

SEQ ID NO: 103 - protein, 108 aa, Artificial Sequence
  Chemically synthesized ABT1-122-554
DIQMTQSPSSLSASVGDRVTITCRASQPIWTELNWYQQKPGKAPKLLIYGSSSLQSGVPSRFSGSGSGTDFTLTISSLQPEDFATYYCQQFAYFPATFGQETKVEIKR

SEQ ID NO: 104 - protein, 108 aa, Artificial Sequence
  Chemically synthesized ABT1-122-555
DIQMTQSPSSLSASVGDRVTITCRASQPIWTELNWYQQKPGKTPKLLIYGSSSLQSGVPSRFSGSGSGTDFTLTISSLQPEDFATYYCQQFAYFPATFGQGTKVEIKR

SEQ ID NO: 105 - protein, 108 aa, Artificial Sequence
  Chemically synthesized ABT1-122-556
DIQMTQSPSSLSASVGDRVTITCRASQPIWTELNWYQQKPGKAPKLLIYGSSSLQSGVPSRFSGSGSGTDFTLTISSLQPEDFATYHCQQFAYFPATFGQGTKVEIKR

SEQ ID NO: 106 - protein, 108 aa, Artificial Sequence
  Chemically synthesized ABT1-122-557
DIQMTQSPSSLSASVGDRVTITCRASQPIWTELNWYQQKPGKAPKLLIYGSSSLQSGVPSRFSGSGSGTDFTLTISSLQPEDFATYYCQQFAYFPATLGQGTKVEIKR

SEQ ID NO: 107 - protein, 108 aa, Artificial Sequence
  Chemically synthesized ABT1-122-750M
DIQMTQSPSSLSASVGDRVTITCSASQHIWTEMSWYQQKPGKAPKLLIYGSASRQKGVPSRFSGSGSGTDFTLTISSLQPEDFATYYCKQFAYFPNTFGQGTKVEIKR

SEQ ID NO: 108 - protein, 108 aa, Artificial Sequence
  Chemically synthesized ABT1-122-750MH
DIQMTQSPSSLSASVGDRVTITCSASQHIWTEMSWYQQKPGKAPKLLIYGSASRQKGVPSRFSGSGSGTDFTLTISSLQPEDFATYHCKQFAYFPNTFGQGTKVEIKR

SEQ ID NO: 109 - protein, 108 aa, Artificial Sequence
  Chemically synthesized ABT1-122-750MT
DIQMTQSPSSLSASVGDRVTITCSASQHIWTEMSWYQQKPGKTPKLLIYGSASRQKGVPSRFSGSGSGTDFTLTISSLQPEDFATYYCKQFAYFPNTFGQGTKVEIKR

SEQ ID NO: 110 - protein, 108 aa, Artificial Sequence
  Chemically synthesized ABT1-122-750T
DIQMTQSPSSLSASVGDRVTITCSASQHIWTEISWYQQKPGKAPKLLIYGSASRQKGVPSRFSGSGSGTDFTLTISSLQPEDFATYYCKQFAYFPNTFGQGTKVEIKR

SEQ ID NO: 111 - protein, 108 aa, Artificial Sequence
  Chemically synthesized ABT1-122-750x
DIQMTQSPSSLSASVGDRVAITCSASQHIWTEISWYQQKPGKAPKLLIYGSASRQKGVPSRFSGSGSGTDFTLTISSLQPEDFATYYCKQFAYFPNTFGQGTKVEIKR

SEQ ID NO: 112 - protein, 108 aa, Artificial Sequence
  Chemically synthesized ABT1-122-750xH
DIQMTQSPSSLSASVGDRVAITCSASQHIWTEISWYQQKPGKAPKLLIYGSASRQKGVPSRFSGSGSGTDFTLTISSLQPEDFATYHCKQFAYFPNTFGQGTKVEIKR

SEQ ID NO: 113 - protein, 108 aa, Artificial Sequence
  Chemically synthesized ABT1-141-25
DIQMTQSPSSLSASVGDRVTITCRASQWIQKQLAWYQQKPGKAPKLLIYSSSYLQSGVPSRFSGSGSGTDFTLTISSLQPEDFATYYCQQHLRVPMTFGQGTKVEIKR

SEQ ID NO: 114 - protein, 108 aa, Artificial Sequence
  Chemically synthesized ABT1-141-29
DIQVTQSPSSLSASVGDRVTITCRASQWIQKQLAWYQLKPGKAPKLLIYSSSYLQSGVPSRFSGSGSGTDFTLTISSLQPEDFATYYCQQHLRVPFTFGQGTKVEIKR

SEQ ID NO: 115 - protein, 108 aa, Artificial Sequence
  Chemically synthesized ABT1-18
DIQMTQSPSSLSASVGDRVTITCRASQSIQRWLAWYQQKPGKAPKLLIYFASQLQSGVPSRFSGSGSGTDFTLTISSLQPEDFATYYCQQLLRLPKTFGQGTKVEIKR

SEQ ID NO: 116 - protein, 108 aa, Artificial Sequence
  Chemically synthesized ABT1-212
DIQMTQSPSSLSASVGDRVTITCRASQRINGNLRWYQQKPGKAPKLLIYSVSQLQSGVPSRFSGSGSGTDFTLTISSLQPEDFATYYCQQGYDWPPTFGQGTKVETKR

SEQ ID NO: 117 - protein, 108 aa, Artificial Sequence
  Chemically synthesized ABT1-221
DIQMTQSPSSLSASVGDRVTITCRASQDIWPYLMWYQQKPGKAPKLLIYYSSMLQSGVPSRFSGSGSGTDFTLTISSLQPEDFATYYCQQFRRWPYTFGQGTKVEIKR

SEQ ID NO: 118 - protein, 108 aa, Artificial Sequence
  Chemically synthesized ABT1-222
DIQMTQSPSSLSASVGDRVTITCRASQPITRNLRWYQQKPGKAPKLLIYHSSVLQSGVPSRFSGSGSGTDFTLTISSLQPEDFATYYCQQGYRWPVTFGQGTKVEIKR

SEQ ID NO: 119 - protein, 108 aa, Artificial Sequence
  Chemically synthesized ABT1-3
DIQMTQSPSSLSASVGDRVTITCRASQSIWTELKWYQQKPGKAPKLLIYGASLLQSGVPSRFSGSGSGTDFTLTISSLQPEDFATYYCQQFAYFPFTFGQGTKVEIKR

SEQ ID NO: 120 - protein, 108 aa, Artificial Sequence
  Chemically synthesized ABT1-9
DIQMTQSPSSLSASVGDRVTITCRASQSIGSSLLWYQQKPGKAPKLLIYLASRLQSGVPSRFSGSGSGTDFTLTISSLQPEDFATYYCQQFRSTPNTFGQGTKVEIKR

SEQ ID NO: 121 - protein, 108 aa, Artificial Sequence
  Chemically synthesized ABT1-95-15
DIQMTQSPSSLSASVGDRVTITCRASQPIVRNLRWYQQKPGKAPKLLIYSSSYLEPGVPSRFSGSGSGTDFTLTISSLQPEDFATYHCQQGYRWPVTFGQGTKVEIKR

SEQ ID NO: 122 - protein, 108 aa, Artificial Sequence
  Chemically synthesized ABT1-95-174
DIQMTQSPSSLSASVGDRVTITCRASRPIVRNLRWYQQKPGKAPKLLIYSVSYLEPGVPSRFSGSGSGTDFTLTISSLQPEDFATYHCRQGYRWPVTFGQGTKVEIKR

SEQ ID NO: 123 - protein, 108 aa, Artificial Sequence
  Chemically synthesized ABT1-95-177
DIQMTQSPSSLSASVGDRVTITCRASQPIVRNLRWYQQKPGKAPKLLIYASSYLEPGVPSRFSGSGSGTDFTLTISSLQPEDFATYHCRQGYRWPVTFGQGTKVEIKR

SEQ ID NO: 124 - protein, 108 aa, Artificial Sequence
  Chemically synthesized ABT1-95-181
DIQMTQSPSSLSASVGDRVTITCRASKPIVRNMRWYQQKPGKAPKLLIYSVSYLEPGVPSRFSGSGSGTDFTLTISSLQPEDFATYHCLQGYRWPPTFGQGTKVEIKR

SEQ ID NO: 125 - protein, 108 aa, Artificial Sequence
  Chemically synthesized ABT1-95-182
DIQMTQSPSSLSASVGDRVTITCRASKPGVRNLRWYQQKPGKAPKLLIYSVSYLEPGVPSRFSGSGSGTDFTLTISSLQPEDFATYHCLQGYRWPPTFGQGTKVEIKR

SEQ ID NO: 126 - protein, 108 aa, Artificial Sequence
  Chemically synthesized ABT1-95-184
DIQMTQSPSSLSASVGDRVTITCRASRTPVRNLRWYQQKPGKAPKLLIYSRSYLEPGVPSRFSGSGSGTDFTLTISSLQPEDFATYHCLQGYRWPPTFGQGTKVEIKR

SEQ ID NO: 127 - protein, 108 aa, Artificial Sequence
  Chemically synthesized ABT1-95-3
DIQMTQSPSSLSASVGDRVTITCRASQPIHGNLRWYQQKPGKAPKLLIYSSSYLQSGVPSRFSGSGSGTDFTLTISSLQPEDFATYHCQQGYRWPVTFGQGTKVEIKR

SEQ ID NO: 128 - protein, 108 aa, Artificial Sequence
  Chemically synthesized ABT1-95-A1
DIQMTQSPSSLSASVGDRVTITCRASRPGVRNLRWYQQKPGKAPKLLIYHVSDLEPGVPSRFSGSGSGTDFTLTISSLQPEDFATYHCRQGYVWPVPFDQGTKVEIKR

SEQ ID NO: 129 - protein, 108 aa, Artificial Sequence
  Chemically synthesized ABT1-95-A2
DIQMTQSPSSLSASVGDRVTITCRILQPPGRNLRWYQQKPGKAPKLLIYSKSFLEPGVPSRFSGSGSGTDFTLTISSLQPEDFATYHCQQGYRWPVTFGQGTKVEIKR

SEQ ID NO: 130 - protein, 108 aa, Artificial Sequence
  Chemically synthesized ABT1-95-A3
DIQMTQSPSSLSASVGDRVTITCRASKPGVRNMRWYQQKPGKAPKLLIYSVSYLEPGVPSRFSGSGSGTDFTLTISSLQPEDFATYHCLQGYRWPPTFGQGTKVEIKR

SEQ ID NO: 131 - protein, 108 aa, Artificial Sequence
  Chemically synthesized ABT1-95-A4
DIQMTQSPSSLSASVGDRVTITCRASRPGVRNLRWYQQKPGKAPKLLIYSRSFLEPGVPSRFSGSGSGTDFTLTISSLQPEDFATYHCLQGYRWPPTFGQGTKVEIKR

SEQ ID NO: 132 - protein, 108 aa, Artificial Sequence
  Chemically synthesized ABT1-95-A5
DIQMTQSPSSLSASVGDRVTITCRASRTPVRNLRWYQQKPGKAPKLLIYSRSFLEPGVPSRFSGSGSGTDFTLTISSLQPEDFATYHCLQGYRWPPTFGQGTKVEIKR

SEQ ID NO: 133 - protein, 108 aa, Artificial Sequence
  Chemically synthesized ABT1-95-A6
DIQMTQSPSSLSASVGDRVTITCRASKPGVRNMRWYQQKPGKAPKLLIYAKSYLEPGVPSRFSGSGSGTDFTLTISSLQPEDFATYHCKQGYRWPVQFGQGTKVEIKR

SEQ ID NO: 134 - DNA, 348 bp, Artificial Sequence
  Chemically synthesized ABT1-6
gaggtgcagctgttggagtctgggggaggcttggtacagcctggggggtccctgcgtctctcctgtgcagcctccggattcacctttggggcttatgatatgcagtgggtccgccaggctccagggaagggtctagagtgggtctcaagtattaataagtctggtgctttgacatcttacgcagactccgtgaagggccggttcaccatctcccgcgacaattccaagaacacgctgtatctgcaaatgaacagcctgcgtgccgaggacaccgcggtatattactgtgcgaaaggttgggcgtcttttgactactggggccagggaaccctggtcaccgtctcgagc

SEQ ID NO: 135 - DNA, 348 bp, Artificial Sequence
  Chemically synthesized ABT1-6-3
gaggtgcagctgttggagtctgggggaggcttggtacagcctggggggtccctgcgtctctcctgtgcagcctccggattcacctttggggcttatgatatgcagtgggtccgccaggctccaggcaagggtctagagtgggtctcaagtatttataagtctggtgctttgacatcttacgcagactccgtgaagggccggttcaccatctcccgcgacaattccaagaacacgctgtatctgcaaatgaacagcctgcgtgccgaggacaccgcggtatattactgtgcgaaaggttgggcgtcttttgactactggggccagggaaccctggtcaccgtctcgagc

SEQ ID NO: 136 - DNA, 348 bp, Artificial Sequence
  Chemically synthesized ABT1-6-23
gaggtgcagctgttggagtctgggggaggcttggtacagcctggggggtccctgcgtctctcctgtgcagcctccggattcacctttgtacgctatgacatggcatgggtccgccaggctccagggaagggtctagagtgggtctcaagtatttataagtctggtgctttgacatcttacgcagactccgtgaagggccggttcaccatctcccgcgacaattccaagaacacgctgtatctgcaaatgaacagcctgcgtgccgaggacaccgcggtatattactgtgcgaaaggttgggcgtcttttgactactggggccagggaaccctggtcaccgtctcgagc

SEQ ID NO: 137 - DNA, 360 bp, Artificial Sequence
  Chemically synthesized ABT1-7
gaggtgcagctgttggagtctgggggaggcttggtacagcctggggggtccctgcgtctctcctgtgcagcctccggattcacctttaggcggtatcggatgcagtgggtccgccaggctccagggaagggtctagagtgggtctcatctattagttgggagggtacgaggacactttacgcagactccgtgaagggccggttcaccatctcccgcgacaattccaagaacacgctgtatctgcaaatgaacagcctgcgtgccgaggacaccgcggtatattactgtgcgaaagtgactcagaagggtttgttgaattttgactactggggccagggaaccctggtcaccgtctcgagc

SEQ ID NO: 138 - DNA, 360 bp, Artificial Sequence
  Chemically synthesized ABT1-8
gaggtgcagctgttggagtctgggggaggcttggtacagcctggggggtccctgcgtctctcctgtgcagcctccggattcacccttaaggcgtataatatgtcgtgggtccgccaggctccagggaagggtctagagtgggtctcactgattagtagtacgggtatgtttacagattacgcagactccgtgaagggccggttcaccatctcccgcgacaattccaagaacacgctgtatctgcaaatgaacagcctgcgtgccgaggacaccgcggtatattactgtgcgaaatggggggttaggcgggggctttattttgactactggggccagggaaccctggtcaccgtctcgagc

SEQ ID NO: 139 - DNA, 348 bp, Artificial Sequence
  Chemically synthesized ABT1-15
gaggtgcagctgttggagtctgggggaggcttggtacagcctggggggtccctgcgtctctcctgtgcagcctccggattcacctttgggcggtatcggatgcagtgggtccgccaggctccagggaagggtctagagtgggtctcaagtattaataagtctggtgctttgacatcttacgcagactccgtgaagggccggttcaccatctcccgcgacaattccaagaacacgctgtatctgcaaatgaacagcctgcgtgccgaggacaccgcggtatattactgtgcgaaaggttgggcgtcttttgactactggggccagggaaccctggtcaccgtctcgagc

SEQ ID NO: 140 - DNA, 360 bp, Artificial Sequence
  Chemically synthesized ABT1-17
gaggtgcagctgttggagtctgggggaggcttggtacagcctggggggtccctgcgtctctcctgtgcagcctccggattcacctttaggcggtatcggatgccgtgggtccgccaggctccagggaagggtctagagtgggtctcatctattagttgggagggtacgaggacactttacgcagactccgtgaagggccggttcaccatctcccgcgacaattccaagaacacgctgtatctgcaaatgaacagcctgcgtgccgaggacaccgcggtatattactgtgcgaaagtgactcaaaagggtttgctgaattttgactactggggccagggaaccctggtcaccgtctcgagc

SEQ ID NO: 141 - DNA, 348 bp, Artificial Sequence
  Chemically synthesized ABT1-19
gaggtgcagctgttggagtctgggggaggcttggtacagcctggggggtccctgcgtctctcctgtgcagcctccggattcacctttcctgtttatagtatgccttgggtccgccaggctccagggaagggtctagagtgggtctcactgattccgtggcctggtttgagtacatactacgcagactccgtgaagggccggttcaccatctcccgcgacaattccaagaacacgctgtatctgcaaatgaacagcctgcgtgccgaggacaccgcggtatattactgtgcgaaagagacgtctaattttgactactggggtcagggaaccctggtcaccgtctcgagc

SEQ ID NO: 142 - DNA, 348 bp, Artificial Sequence
  Chemically synthesized ABT1-20
gaggtgcagctgttggagactgggggaggcttggtacagcctggggggtccctgcgtctctcctgtgcagcctccggattcacctttacgccttatcggatggggtgggtccgccaggctccagggaagggtctagagtgggtctcacatattgggatttggggtgctaatacatactacgcagactccgtgaagggccggttcaccatctcccgcgacaattccaagaacacgctgtatctgcaaatgaacagcctgcgcgccgaggacaccgcggtatattactgtgcgaaacatccgaggccttttgactactggggtcagggaaccctggtcaccgtctcgagc

SEQ ID NO: 143 - DNA, 348 bp, Artificial Sequence
  Chemically synthesized ABT1-21
gaggtgcagctgttggagtctgggggaggcttggtacagcctggggggtccctgcgtctctcctgtgcagcctccggattcacctttaggccgtatgcgatgacttgggtccgccaggctccagggaagggtctagagtgggtctcaactattgggcggacgggtactcgtacatactacgcagactccgtgaagggccggttcaccatctcccgcgacaattccaagaacacgctgtatctgcaaatgaacagcctgcgtgccgaggacaccgcggtatattactgtgcgaaagggcggcggaggtttgactactggggtcagggaaccctggtcaccgtctcgagc

SEQ ID NO: 144 - DNA, 360 bp, Artificial Sequence; identical to SEQ ID NO: 138
  Chemically synthesized ABT1-22

SEQ ID NO: 145 - DNA, 348 bp, Artificial Sequence
  Chemically synthesized ABT1-23
gaggtgcagctgttggagtctgggggaggcttggtacagcctggggggtccctgcgtctctcctgtgcagcctccggattcaccttttcgtcgtatcctatggagtgggtccgccaggctccagggaagggtctagagtgggtctcagcgattgcgtggccgggtagtatgacatactacgcagactccgtgaagggccggttcaccatctcccgcgacaattccaagaacacgctgtatctgcaaatgaacagcctgcgtgccgaggacaccgcggtatattactgtgcgaaaacgcatcggctttttgactactggggtcagggaaccctggtcaccgtctcgagc

SEQ ID NO: 146 - DNA, 348 bp, Artificial Sequence
  Chemically synthesized ABT1-31
gaggtgcagctgttggagtctgggggaggcttggtacagcctggggggtccctgcgtctctcctgtgcagcctccggattcacctttagcagctatgccatgagctgggtccgccaggctccagggaagggtctagagtgggtctcaggtattaatcggtctggtacgcgtacatactacgcagactccgtgaagggccggttcaccatctcccgcgacaattccaagaacacgctgtatctgcaaatgaacagcctgcgtgccgaggacaccgcggtatattactgtgcgaaaaggattcgtcattttgactactggggtcagggaaccctggtcaccgtctcgagc

SEQ ID NO: 147 - DNA, 360 bp, Artificial Sequence
  Chemically synthesized ABT1-32
gaggtgcagctgttggagtctgggggaggcttggtacagcctggggggtccctgcgtctctcctgtgcagcctccggattcacctttcctgattatgatatgaagtgggtccgccaggctccagggaagggtctagagtgggtctcagctattagtggtagtggtggtagcacatactacgcagactccgtgaagggccggttcaccatctcccgcgacaactccaagaacacgctgtatctgcaaatgaacagcctgcgtgccgaggacaccgctgtatattactgtgcgaaaattgttggttttgcgtgggattattttgactactggggccagggaaccctggtcaccgtctcgagc

SEQ ID NO: 148 - DNA, 360 bp, Artificial Sequence
  Chemically synthesized ABT1-33
gaggtgcagctgttggagtctgggggaggcttggtacagcctggggggtccctgcgtctctcctgtgcagcctccggatacacctttaggagttatagtatgaattgggtccgccaggctccagggaagggtctagagtgggtctcagcgattagtccgcatggtacgtatacaaagtacgcagactccgtgaagggccggttcaccatctcccgcgacaattccaagaacacgctgtatctgcaaatgaacagcctgcgtgccgaggacaccgcggtatattactgtgcgaaacggcgtattcgttcttcgggtttttttgactactggggccagggaaccctggtcaccgtctcgagc

SEQ ID NO: 149 - DNA, 360 bp, Artificial Sequence
  Chemically synthesized ABT1-34
gaggtgcagctgttggagtctgggggaggcttggtacagcctggggggtccctgcgtctctcctgtgcagcctccggattcacctttgctaggtattcgatgagttgggtccgccaggctccagggaagggtctagagtgggtctcaatgattgctcctgcgggtaggatgacattgtacgcagactccgtgaagggccggttcaccatctcccgcgacaattccaagaacacgctgtatctgcaaatgaacagcctgcgtgccgaggacaccgcggtatattactgtgcgaaaacgggtttgactcggaggacgcggtttgactactggggccagggaaccctggtcaccgtctcgagc

SEQ ID NO: 150 - DNA, 360 bp, Artificial Sequence
  Chemically synthesized ABT1-35
gaggtgcagctgttggagtctgggggaggcttggtacagcctggggggtccctgcgtctctcctgtgcagcctccggattcacctttaagttgtatgagatggagtgggtccgccaggctccagggaagggtctagagtgggtctcacggattgatagtatgggtgggattacagagtacgcagactccgtgaagggccggttcaccatctcccgcgacaattccaagaacacgctgtatctgcaaatgaacagcctgcgtgccgaggacaccgcggtatattactgtgcgaaaactgagcttccttatccttcggcttttgactactggggccagggaaccctggtcaccgtctcgagc

SEQ ID NO: 151 - DNA, 348 bp, Artificial Sequence
  Chemically synthesized ABT1-36
gaggtgcagctgttggagtctgggggaggcttggtacagcctggggggtccctgcgtctctcctgtgcagcctccggattcacctttagcagctatgccatgagctgggtccgccaggctccagggaagggtctagagtgggtctcatctatttcgtcgggtggtagtgctacagcgtacgcagactccgtgatgggccggttcaccatctcccgcgacaattccaagaacacgctgtatctgcaaatgaacagcctgcgtgccgaggacgccgcggtatattactgtgcgaaaaggtcttatctgtttgactactggggccagggaaccctggtcaccgtctcgagc

SEQ ID NO: 152 - DNA, 348 bp, Artificial Sequence
  Chemically synthesized ABT1-37
gaggtgcagctgttggagtctgggggaggcttggtacagcctggggggtccctgcgtctctcctgtgcagcctccggattcacctttcatgattatgatatgaagtgggtccgccaggctccagggaagggtctagagtgggtctcatggatttcgtttgatggtgctcggacattttacgcagactccgtgcagggccggttcaccatctcccgcgacaattccaagaacacgctgtatctgcaaatgaacagcctgcgtgccgaggacaccgcggtatattactgtgcgaaagaggagacgggttttgactactggggccagggaaccctggtcaccgtctcgagc

SEQ ID NO: 153 - DNA, 348 bp, Artificial Sequence
  Chemically synthesized ABT1-38
gaggtgcagctgttggagtctgggggaggcttggtacagcctggggggtccctgcgtctctcctgtgcagcctccggattcacctttaggcagtatcggatggggtgggtccgccaggctccagggaggggtctagagtgggtctcacggattgagagtgatggtgcggagacatcttacgcagactccgtgaagggccggttcaccatctcccgcgacaattccaagaacacgctgtatctgcaaatgaacagcctgcgtgccgaggacaccgcggtatattactgtgcgaaacctgattggatttttgactacaggggccagggaaccctggtcaccgtctcgagc

SEQ ID NO: 154 - DNA, 360 bp, Artificial Sequence
  Chemically synthesized ABT1-40
gaggtgcagctgttggagtctgggggaggcttggtacagcctggggggtccctgcgtctctcctgtgcagcctccggattcacctttcctatttattttatggtttgggtccgccaggctccagggaagggtctagagtgggtctcactgattagtagtacgggtatgtttacagattacgcagactccgtgaagggccggttcaccatctcccgcgacaattccaagaacacgctgtatctgcaaatgaacagcctgcgtgccgaggacaccgcggtatattactgtgcgaaatggggggttaggcgggggctttattttgactactggggccagggaaccctggtcaccgtctcgagc

SEQ ID NO: 155 - DNA, 360 bp, Artificial Sequence
  Chemically synthesized ABT1-41
gaggtgcagctgttggagtctgggggaggcttggtacagcctggggggtccctgcgtctctcctgtgcagcctccggattcacctttcagtattatgttatgggttgggtccgccaggctccagggaagggtctagagtgggtctcatggattgctacgtatggtagtcatacatggtacgcagactccgtgaagggccggttcaccatctcccgcgacaattccaagaacacgctgtatctgcaaatgaacagcctgcgtgccgaggacaccgcggtatattactgtgcgaaacagggtaatcatcgtttgggtcattttgactactggggccagggaaccctggtcaccgtctcgagc

SEQ ID NO: 156 - DNA, 360 bp, Artificial Sequence
  Chemically synthesized ABT1-42
gaggtgcagctgttggagtctgggggaggcttggtacagcctggggggtccctgcgtctctcctgtgcagcctccggattcacctttgagaagtatgagatggcgtgggtccgccaggctccagggaagggtctagagtgggtctcagctattgggcctatgggttttggtacaaattacgcagactccgtgaagggccggttcaccatctcccgcgacaattccaagaacacgctgtatctgcaaatgaacagcctgcgtgccgaggacaccgcggtatattactgtgcgaaatttgggaagcatcctccgggtacttttgactactggggccagggaaccctggtcaccgtctcgagc

SEQ ID NO: 157 - DNA, 360 bp, Artificial Sequence
  Chemically synthesized ABT1-43
gaggtgcagctgttggagtctgggggaggcttggtacagcctggggggtccctgcgtctctcctgtgcagcctccggattcacctttgagaagtatgagatggcgtgggtccgccaggctccagggaagggtctagagtgggtctcagctattgggcctatgggttttggtacaaattacgcagactccgtgaagggccggttcaccatctcccgcgacaattccaagaacacgctgtatctgcaaatgaacagcctgcgtgccgaggacaccgcggtatattactgtgcgaaatttgggaagcatcctcagggtacttttgactactggggccagggaaccctggtcaccgtctcgagc

SEQ ID NO: 158 - DNA, 360 bp, Artificial Sequence
  Chemically synthesized ABT1-45
gaggtgcagctgttggagtctgggggaggcttggtacagcctggggggtccctgcgcctctcctgtgcagcctccggattcacctttcataattataggatgttgtgggtccgccaggctccagggaagggtctagagtgggtctcagctattagtggtagtggtggtagcacatactacgcagactccgtgaagggccggttcaccatctcccgcgacaattccaagaacacgctgtatctgcaaatgaacagcctgcgtgccgaggacaccgcggtatattactgtgcgaaatcggcgcctattccgatgagtatgtttgactactggggccagggaaccctggtcaccgtctcgagc

SEQ ID NO: 159 - DNA, 360 bp, Artificial Sequence
  Chemically synthesized ABT1-46
gaggtgcagctgttggagtctgggggaggcttggtacagcctggggggtccctgcgtctctcctgtgcagcctccggattcacctttgggaattatatgatggattgggtccgccaggctccagggaagggtctagagtgggtctcagctattagtggtagtggtggtagcacatactacgcagactccgtgaagggccggttcaccatctcccgcgacaattccaagaacacgctgtatctgcaaatgaacagcctgcgtgccgaggacaccgcggtatattactgtgcgaaactggggcatccgatgggtaatggttttgactactggggccagggaaccctggtcaccgtctcgagc

SEQ ID NO: 160 - DNA, 348 bp, Artificial Sequence
  Chemically synthesized ABT1-47
gaggtgcagctgttggagtctgggggaggcttggtacagcctggggggtccctgcgtctctcctgtgcagcctccggattcacctttggggcttatgatatgcactgggtccgccaggctccagggaagggtctagagtgggtctcatgtattaataagtctggtgctttgacatcttacgcagactccgtgaagggccggttcaccatctcccgcgacaattccaagaacacgctgtatctgcaaatgaacagcctgcgtgccgaggacaccgcggtatattactgtgcgaaaggttgttagtcttttgactactggggccagggaaccctggtcaccgtctcgagc

SEQ ID NO: 161 - DNA, 348 bp, Artificial Sequence
  Chemically synthesized ABT1-49
gaggtgcagctgttggagtctgggggaggcttggtacagcctggggggtccctgcgtctctcctgtgcagcctccggattcacctttaatttgtatgcgatgaggtgggtccgccaggctccagggaagggtctagagtgggtctcagctatttcgccgatgggtaagggtacatattacgcagactccgtgaagggccggttcaccatctcccgcgacaattccaagaacacgctgtatctgcaaatgaacagcctgcgtgccgaggacaccgcggtatattactgtgcgaaagtggggtatatttttgactactggggccagggaaccctggtcaccgtctcgagc

SEQ ID NO: 162 - DNA, 348 bp, Artificial Sequence
  Chemically synthesized ABT1-50
gaggtgcagctgttggagtctgggggaggcttggtacagcctggggggtccctgcgtctctcctgtgcagccaccggattcacctttagcagctatgccatgagctgggtccgccaggctccagggaagggtctagagtgggtctcatctatttcgtcgggtggtagtgctacagcgtacgcagactccgtgaagggccggttcaccatctcccgcgacaattccaagaacacgctgtatctgcaaatgaacagcctgcgtgccgaggacaccgcggtatattactgtgcgaaaaggtcttatctgtttgactactggggccagggaaccctggtcaccgtctcgagc

SEQ ID NO: 163 - DNA, 348 bp, Artificial Sequence
  Chemically synthesized ABT1-51
gaggtgcagctgttggagtctgggggaggcttggtacagcctggggggtccctgcgtctctcctgtgcagcctccggattcacctttagcagctatgccatgagctgggtccgccaggctccagggaagggtctagagtgggtctcagctattagtggtagtggtggtagcacatactacgcagactccgtgaagggccggttcaccatctcccgtgacaattccaagaacacgctgtatctgcaaatgaacagcctgcgtgccgaggacaccgcggtatattactgtgcgaaaagttatggtgcttttgactactggggccagggaaccctggtcaccgtctcgagc

SEQ ID NO: 164 - DNA, 348 bp, Artificial Sequence
  Chemically synthesized ABT1-52
gaggtgcagctgttggagtctgggggaggcttggtacagcctggggggtccctgcgtctctcctgtgcagcctccggattcacctttaggagttatcggatgagttgggtccgccaggctccagggaagggtctagagtgggtctcaagtatttctgctatgggtcgtcgtacactttacgcagactccgtgaagggccggttcaccatctcccgcgacaattccaagaacacgctgtatctgcaaatgaacagcctgcgtgccgaggacaccgcggtatattactgtgcgaaagttggggcgcgttttgactactggggccagggaaccctggtcaccgtctcgagc

SEQ ID NO: 165 - DNA, 348 bp, Artificial Sequence
  Chemically synthesized ABT1-75
gaggtgcagctgttggagtctgggggaggcttggtacagcctggggggtccctgcgtctctcctgtgcagcctccggattcacctttagcagctatgccatgagctgggtccgccaggctccagggaagggtctagagtgggtctcaacgattactcctggtggttctgggacatactacgcagactccgtgaagggccggttcaccatctcccgcgacaattccaagaacacgctgtatctgcaaatgaacagcctgcgtgccgaggacaccgcggtatattactgtgcgaaaaggaagtttgcttttgactactggggtcagggaaccctggtcaccgtctcgagc

SEQ ID NO: 166 - DNA, 360 bp, Artificial Sequence
  Chemically synthesized ABT1-76
gaggtgcagctgttggagtctgggggaggcttggtacagcctggggggtccctgcgtctctcctgtgcagcctccggattcacctttcctctttatgatatgtcgtgggtccgccaggctccagggaagggtctagagtgggtctcaaggattcgtgcgaatggtggtcggacatactacgcagactccgtgaagggccggttcaccatctcccgcgacaattccaagaacacgctgtatctgcaaatgaacagcctgcgtgccgaggacaccgcggtatattactgtgcgaaaacggcggcttgggttaagggtaattttgactactggggtcagggaaccctggtcaccgtctcgagc

SEQ ID NO: 167 - DNA, 360 bp, Artificial Sequence
  Chemically synthesized ABT1-77
gaggtgcagctgttggagtctgggggaggcttggtacagcctggggggtccctgcgtctctcctgtgcagcctccggattcacctttgtgcgttattctatgctgtgggtccgccaggctccagggaagggtctagagtgggtctcagctattagtggtagtggtggtagcacatactacgcagactccgtgaagggccggttcaccatctcccgcgacaattccaagaacacgctgtatctgcaaatgaacagcctgcgtgccgaggataccgcggtatattactgtgcgaaaccttctaggatgagtcttaagaagtttgactactggggtcagggaaccctggtcaccgtctcgagc

SEQ ID NO: 168 - DNA, 360 bp, Artificial Sequence
  Chemically synthesized ABT1-78
gaggtgcagctgttggagtctgggggaggcttggtacagcctggggggtccctgcgtctctcctgtgcagcctccggattcacctttgggcattatacgatgacttgggtccgccaggctccagggaagggtccagagtgggtctcagctattagtggtagtggtggtagcacatactacgcagactccgtgaagggccggttcaccatctcccgcgacaattccaagaacacgctgtatctgcaaatgaacagcctgcgtgccgaggacaccgcggtatattactgtgcgaaaagtattgagctgtcgggtggggcgtttgactactggggccagggaaccctggtcaccgtctcgagc

SEQ ID NO: 169 - DNA, 360 bp, Artificial Sequence
  Chemically synthesized ABT1-79
gaggtgcagctgttggagtctgggggaggcttggtacagcctggggggtccctgcgtctctcctgtgcagcctccggattcacctttgaggattatcatatggcttgggtccgccaggctccagggaagggtctagagtgggtctcagctattagtggtagtggtggtagcacatactacgcagactccgtgaagggccggttcaccatctcccgcgacaattccaagaacacgctgtatctgcaaatgaacagcctgcgtgccgaggacaccgcggtatattactgtgcgaaaaaggcttctggtcgtcgttcgatgtttgactactggggccagggaaccctggtcaccgtctcgagc

SEQ ID NO: 170 - DNA, 360 bp, Artificial Sequence
  Chemically synthesized ABT1-81
gaggtgcagctgttggagtctgggggaggcttggtacagcctggggggtccctgcgtctctcctgtgcagcctccggattcacctttagcagctatgccatgagctgggtccgccaggctccagggaagggtctagagtgggtctcagctattagtggtagtggtggtagcacatactacgcagactccgtgaagggccggttcaccatctcccgcgacaattccaagaacacgctgtatctgcaaatgaacagcctgcgtgccgaggacaccgcggtatattactgtgcgaaagctcgggtggcgccggctgttctgtttgactaccggggccagggaaccctggtcaccgtctcgagc

SEQ ID NO: 171 - DNA, 348 bp, Artificial Sequence
  Chemically synthesized ABT1-84
gaggtgcagctgtcggagtctgggggaggcttggtacagcctggggggtccctgcgtctctcctgtgcagcctccggattcacctttaatgattataggatggtgtgggcccgccaggctccagggaagggtctagagtgggtctcaactattagtaagtctggtcggactacatactacgcagactccgtgaagggccggttcaccatctcccgcgacaattccaagaacacgctgtatctgcaaatgaacagcctgcgtgccgaggataccgcggtatattactgtgcgaaatatacgattccgtttgactactggggtcagggaaccctggtcaccgtctcgagc

SEQ ID NO: 172 - DNA, 366 bp, Artificial Sequence
  Chemically synthesized ABT1-85
gaggtgcagctgttggagtctgggggaggcttggtacagcctggggggtccctgcgtctctcctgtgcagcctccggactcacctttagtttgtatgggatggcgtgggcccgccaggctccagggaagggtctagagtgggtctcaagtatttcgtctagtggtagtagtacatactacgcagactccgtgaagggccggttcaccatctcccgcgacaattccaagaacacgctgtatctgcaaatgaacagcctgcgtgccgaggacaccgcggtatattactgtgcgaaacagcgttggtctcatggtagtgtgcttggttttgactactggggtcagggaaccctggtcaccgtctcgagc

SEQ ID NO: 173 - DNA, 366 bp, Artificial Sequence
  Chemically synthesized ABT1-86
gaggtgcagctgttggagtctgggggaggcttggtacagcctggggggtccctgcgtctctcctgtgcagcctccggattcacctttgatcgttatattatggcttgggtccgccaggctccagggaagggtctggagtgggtctcatcgattactcctagtggtgctgctacatactacgcagactccgtgaagggccggttcaccatctcccgcgacaattccaagaacacgctgtatctgcaaatgaacagcctgcgtgccgaggacaccgcggtatattactgtgcggaagagcctgctgataggtatagtacgtggacttttgactactggggtcagggaaccctggtcaccgtctcgagc

SEQ ID NO: 174 - DNA, 372 bp, Artificial Sequence
  Chemically synthesized ABT1-87
gaggtgcagctgttggagtctgggggaggcttggtacagcctggggggtccctgcgtctctcctgtgcagcctccggattcacctttggggcgtataatatgaattgggtccgccaggctccagggaagggtctagagtgggtctcaactatttctgcttcgggtcgttatacatactacgcagactccgtgaagggccggttcaccatcttccgcgacaattccaagaacacgctgtatctgcaaatgaacagcctgcgtgccgaggacaccgcggtatattactgtgcggaagggtttatttctgtggatgagtatgtgccgtatcattttgactactggggtcagggaaccctggtcaccgtctcgagc

SEQ ID NO: 175 - DNA, 366 bp, Artificial Sequence
  Chemically synthesized ABT1-88
gaggtgcagctgttggagtctgggggaggcttggtacagcctggggggtccctgcgtctctcctgtgcagcctccggattcacctttaggttgtataagatgtcttgggtccgccaggctccagggaagggtctagagtgggtctcaagtattagttctaatggtgaggggacatactacgcagactccgtgaagggccggttcaccatctcccgcgacaattccaagaacacgctgtatctgcaaatgaacagcctgcgtgccgaggacaccgcggtatattactgtgcgaaaactttgtatctgtgggggtcgaggcaggcttttgactactggggtcagggaaccctggtcaccgtctcgagc

SEQ ID NO: 176 - DNA, 372 bp, Artificial Sequence
  Chemically synthesized ABT1-89
gaggtgcagctgttggagtctgggggaggcttggtacagcctggggggtccctgcgtctctcctgtgcagcctccggattcacctttcggttgtatgggatgaattgggtccgccaggctccagggaagggtctagagtgggtctcagctatttcttcggatggtcagaggacatactacgcagactccgtgaagggccggttcaccatctcccgcgacaattccaagaacacgctgtatctgcaaatgaacagcctgcgtgccgaggacaccgcggtatattactgtgcgaaagggtggttgaggggtcataatcttatgcggacggagtttgactactggggtcagggaaccctggtcaccgtctcgagc

SEQ ID NO: 177 - DNA, 369 bp, Artificial Sequence
  Chemically synthesized ABT1-90
gaggtgcagctgttggagtctgggggaggcttggtacagcctggggggtccctgcgtctctcctgtgcagcctccggattcacctttcatgattattggatgacgtgggtccgccaggctccagggaagggtctggagtgggtctcatctatttctgctttgggtggtgctacatactacgcagactccgtgaagggccggttcaccatctcccgcgacaattccaagaacacgctgtatctgcaaatgaacagcctgcgtgccgaggacaccgcggtatattactgtgcgaaagggcttcttcgggagccgcagtggcggcagggttttgactactggggtcagggaaccctggtcaccgtctcgagc

SEQ ID NO: 178 - DNA, 351 bp, Artificial Sequence
  Chemically synthesized ABT1-91
gaggtgcagctgttggagtctgggggaggcttggtacagcctggggggtccctgcgtctctcctgtgcagcctccggattcacctttacggattatactatgatgtgggtccgccaggctccagggaagggtctagagtgggtctcaagtattgagcggsatggtcggcggacatactacgcagactccgtgaagggccggttcaccatctcccgcgacaattccaagaacacgctgtatctgcaaatgaacagcctgcgtgccgaggataccgcggtatattactgtgcgaaagggcaggcgaagttttttgactactggggtcagggaaccctggtcaccgtctcgagc

SEQ ID NO: 179 - DNA, 360 bp, Artificial Sequence
  Chemically synthesized ABT1-92
gaggtgcagctgttggagtctgggggaggcttggtacagcctggggggtccctgcgtctctcctgtgcagcctccggattcaccttttctacgtatactatgacttgggtccgccaggctccagggaagggtctagagtgggtctcaactatttttcctgggggttcgacgacatactacgcagactccgtgaagggccggttcaccatctcccgcgacaattccaagaacacgctgtatctgcaaatgaacagcctgcgtgccgaggacaccgcggtatattactgtgcgaaatatgttgattttgtgaagttgtcttttgactactggggtcagagaaccctggtcaccgtctcgagc

SEQ ID NO: 180 - DNA, 372 bp, Artificial Sequence
  Chemically synthesized ABT1-93
gaggtgcagctgttggagtctgggggaggcttggtacagcctggggggtccctgcgtctctcctgtgcagcctccggattcacctttaatgagtataatatggtgtgggtccgccaggctccagggaagggtctagagtgggtctcaagtatttctgggggtggtgggtttacatactacgcagactccgtgaagggccggttcaccatctcccgcgacaattccaagaacacgctgtatctgcaaatgaacagcctgcgtgccgaggataccgcggtatattactgtgcgaaacctctgagggggtttgtgtgttcgcagcattgttcttttgactactggggtcagggaaccctggtcaccgtctcgagc

SEQ ID NO: 181 - DNA, 348 bp, Artificial Sequence
  Chemically synthesized ABT1-94
gaggtgcagctgttggagtctgggggaggcttggtacagcctggggggtccctgcgtctctcctgtgcagcctccggattcacctttcatgtgtatgatatggggtgggtccgccaggctccagggaagggtctagagtgggtctcatttattgatcggatgggtcgtcgtacatactacgcagactccgtgaagggccggttcaccatctcccgcgacaattccaagaacacgctgtatctgcaaatgaacagcctgcgtgccgaggataccgcggtatattactgtgcgaaacctgggtatccgtttgactactggggtcagggaaccctggtcaccgtctcgagc

SEQ ID NO: 182 - DNA, 360 bp, Artificial Sequence
  Chemically synthesized ABT1-96
gaggtgcagctgttggagtctgggggaggcttggtacagcctggggggtccctgcgtctctcctgtgcagcctccggattcacctttaatcagtataatatgttttgggtccgccaggctccagggaagggtctagagtgggtctcagttattagtggttcgggtcggtttacatactacgcagactccgtgaagggccggttcaccatctcccgcgacaattccaagaacacgctgtatctgcaaatgaacagcctgcgtgccgaggataccgcggtatattactgtgcgaaagggtggtggaggcgtgatcctccttttgactactggggtcagggaaccctggtcaccgtctcgagc

SEQ ID NO: 183 - DNA, 360 bp, Artificial Sequence
  Chemically synthesized ABT1-97
gaggtgcagctgttggagtctgggggaggcttggtacagcctggggggtccctgcgtctctcctgtgcagcctccggattcaccttttgggagtatgatatgtattgggtccgccaggctccagggaagggtctagagtgggtctcacggatttctggttcgggtcgttatacatactacgcagactccgtgaagggccggttcaccatctcccgcgacaattccaagaacacgctgtatctgcaaatgaacagcctgcgtgccgaggacaccgcggtatattactgtgcgaaaaggtcgcttactcgtccgagtcagtttgactactggggtcagggaaccctggtcaccgtctcgagc

SEQ ID NO: 184 - DNA, 348 bp, Artificial Sequence
  Chemically synthesized ABT1-98
gaggtgcagctgttggagtctgggggaggcttggtacagcctggggggtccctgcgtctctcctgtgcagcctccggattcacctttgatggttatattatgtcgtgggtccgccaggctccagggaagggtctagagtgggtctcaactattagtccgttgggttctgttacatactacgcagactccgtgaagggccggttcaccatctcccgcgacaattccaagaacacgctgtatctgcaaatgaacagcctgcgtgccgaggacaccgcggtatattactgtgcgaaaaaggggccgtggtttgactactggggtcagggaaccctggtcaccgtctcgagc

SEQ ID NO: 185 - DNA, 366 bp, Artificial Sequence
  Chemically synthesized ABT1-99
gaggtgcagctgttggagtctgggggaggcttggtacagcctggggggtccctgcgtctctcctgtgcagcctccggattcacctttggtaagtattctatgacgtgggtccgccaggctccagggaagggtctagagtgggtctcagttattgatccgtggggtcattatacatactacgcagactccgtgaagggccggttcaccatctcccgcgacaattccaagaacacgctgtatctgcaaatgaacagcctgcgtgccgaggacaccgcggtatattactgtgcgaaatcggttgatgctacgctgttgcgtaggtattttgactactggggtcagggaaccctggtcaccgtctcgagc

SEQ ID NO: 186 - DNA, 348 bp, Artificial Sequence
  Chemically synthesized ABT1-101
gaggtgcagctgttggagtctgggggaggcttggtacagcctggggggtccctgcgtctctcctgtgcagcctccggattcaccttttcgaagtattggatgagttgggtccgccaggctccagggaagggtctggagtgggtctcatctatttctcctgatggtaagactacatactacgcagactccgtgaagggccggttcaccatctcccgcgacaattccaagaacacgctgtatctgcaaatgaacagcctgcgtgccgaggacaccgcggtatattactgtgcgaaaggtgcgtttgcgtttgactactggggtcagggaaccctggtcaccgtctcgagc

SEQ ID NO: 187 - DNA, 347 bp, Artificial Sequence
  Chemically synthesized ABT1-102
gaggtgcagctgttggagtctgggggaggcttggtacagcctggggggtccctgcgtctctcctgtgcagcctccggattcacctttcggaattatgcgatgtcttgggtccgccaggctccagggaagggtctagagtgggtctcaacgattactccgctgggttctagtacatactatgcagactccgtgaagggccggttcaccatctcccgcgacaattccaagaacacgctgtatctgcaaatgaacagcctgcgtgccgaggacaccgcggtatattactgtgcgaaaagggcgtgggcttttgactactggggtcagggaacctggtcaccgtctcgagc

SEQ ID NO: 188 - DNA, 348 bp, Artificial Sequence
  Chemically synthesized ABT1-103
gaggtgcagctgttggagtctgggggaggcttggtacggcctggggggtccctgcgtctctcctgtgcagcctccggattcacctttgagcggtattggatgacttgggtccgccaggctccagggaagggtctagagtgggtctcatatatttcgagtagtggtacggctacatactacgcagactccgtgaagggccggttcaccatctcccgcgacaattccaagaacacgctgtatctgcaaatgaacagcctgcgtgccgaggacaccgcggtatattactgtgcgaaaggggctccgaattttgactactggggtcagggaaccctggtcaccgtctcgagc

SEQ ID NO: 189 - DNA, 348 bp, Artificial Sequence
  Chemically synthesized ABT1-104
gaggtgcagctgttggagtctgggggaggcttggtacagcctggggggtccctgcgtctctcctgtgcagcctccggattcacctttaagtcttatcctatgcgttgggtccgccaggctccagggaagggtctagagtgggtctcaacgattagtcctttgggttctacgacatactacgcagactccgtgaagggccggttcaccatctcccgcgacaattccaagaacacgctgtatctgcaaatgaacagcctgcgtgccgaggacaccgcggtatattactgtgcgaaagcttcttattcttttgactactggggtcagggaaccctggtcaccgtctcgagc

SEQ ID NO: 190 - DNA, 348 bp, Artificial Sequence
  Chemically synthesized ABT1-105
gaggtgcagctgttggagtctgggggaggcttggtacagcctggggggtccctgcgtctctcctgtgcagcctctggattcaccttttcgcagtatcgtatgttttgggcccgccaggctccagggaagggtctagagtgggtctcaactattagtacttcgggtaataagacatactacgcagactccgtgaagggccggttcaccatctcccgcgacaattccaagaacacgctgtatctgcaaatgaacagcctgcgtgccgaggacaccgcggtatattactgtgcgaaagtttctaagccgtttgactactggggtcagggaaccctggtcaccgtctcgagc

SEQ ID NO: 191 - DNA, 348 bp, Artificial Sequence
  Chemically synthesized ABT1-106
gaggtgcagctgttggagtctgggggaggcttggtacagcctggggggtccctgcgtctctcctgtgcagcctccggattcacctttgagaattatactatgaagtgggtccgccaggctccagggaagggtctagagtgggtctcatctatttcgcctgttggttcggttacatactacgcagactccgtgaagggccggttcaccatctcccgcgacaattccaagaacacgctgtatctgcaaatgaacagcctgcgtgccgaggataccgcggtatattactgtgcgaaaccgtcgcctttttttgactactggggtcagggaaccctggtcaccgtctcgagc

SEQ ID NO: 192 - DNA, 366 bp, Artificial Sequence
  Chemically synthesized ABT1-109
gaggtgcagctgttggagtctgggggaggcttggtacagcctggggggtccctgcgtctctcctgtgcagcctccggattcacctttgctgggtataatatgatgtgggtccgccaggctccagggaagggtctagagtgggtctcaactattgcgtatgatggttatcgtacatactacgcagactccgtgaagggccggttcaccatctcccgcgacaattccaagaacacgctgtatctgcaaatgaacagcctgcgtgccgaggacaccgcggtatattactgtgcgaaaaatatgcagattactaggccgcgtccgacgtttgactactggggtcagggaaccctggtcaccgtctcgagc

SEQ ID NO: 193 - DNA, 366 bp, Artificial Sequence
  Chemically synthesized ABT1-110
gaggtgcagctgttggagtctgggggaggcttggtacagcctggggggtccctgcgtctctcctgtgcagcctccggattcacctttagtcggtataatatgatgtgggtccgccaggctccagggaagggtctagagtgggtctcaactatttcgtatgatggttttcgtacatactacgcagactccgtgaagggccggttcaccatctcccgcgacaattccaagaacacgctgtatctgcaaatgaacagcctgcgtgccgaggacaccgcggtatattactgtgcgaaaaatcattctactcagggtaaggcgaatgtgtctgactactggggtcagggaaccctggtcaccgtctcgagc

SEQ ID NO: 194 - DNA, 366 bp, Artificial Sequence
  Chemically synthesized ABT1-111
gaggtgcagctgttggagtctgggggaggcttggtacagcctggggggtccctgcgtctctcctgtgcagcctccggattcaccttttctaattatggtatgcagtgggtccgccaggctccagggaagggtctagagtgggtctcatatattagtggttctggtttgcttacatactacgcagactccgtgaagggccggttcaccatctcccgcgacaattccaagaacacgctgtatctgcaaatgaacagcctgcgtgccgaggataccgcggtatattactgtgcgaaatctgatgtgggtttgcggctgcctgcttcttttgactactggggtcagggaaccctggtcaccgtctcgagc

SEQ ID NO: 195 - DNA, 369 bp, Artificial Sequence
  Chemically synthesized ABT1-113
gaggtgcagctgttggagtctgggggaggcttggtacagcctggggggtccctgcgtctctcctgtgcagcctccggattcacctttcagaattatgatatgacgtgggtccgccaggctccagggaagggtctagagtgggtctcaacgatttctagtggtggttcgttgacatactacgcagactccgtgaagggccggttcaccatctcccgcgacaattccaagaacacgctgtatctgcaaatgaacagcctgcgtgccgaggacaccgcggtatattactgtgcgaaacttagttatcgttggtcgtatacgttttcggattttgactactggggtcagggaaccctggtcaccgtctcgagc

SEQ ID NO: 196 - DNA, 297 bp, Artificial Sequence
  Chemically synthesized ABT1-117
gaggtgcagctgttggagtccgggggaggcttggtacagcctggggggtccctgcgtctctcctgtgcagcctccggattcacctttgcggggtatgatatgctgtgggtccgccaggctccagggaagggtctagagtgggtctcaatgattctggggactggtagtggtacatactacgcagactccgtgaagggccggttcaccatctcccgcgacaattccaagaacacgctgtatctgcaaatgaacagcctgcgtgccgaggacaccgcggtatattactgtgcgaaacgg

SEQ ID NO: 197 - DNA, 366 bp, Artificial Sequence
  Chemically synthesized ABT1-118
gaggtgcagctgttggagtctgggggaggcttggtacagcctggggggtccctgcgtctctcctgtgcagcctccggattcacctttggggcgtatactatgtattgggtccgccaggctccagggaagggtctagagtgggtctcacatatttcgccggtgggttctgatacatactacgcagactccgtgaagggccggttcaccatctcccgcgacaattccaagaacacgctgtatctgcaaatgaacagcctgcgtgccgaggacaccgcggtatattactgtgcgaaatttgtttttttggcggggcgtttgcctacttttgactactggggtcagggaaccctggtcaccgtctcgagc

SEQ ID NO: 198 - DNA, 348 bp, Artificial Sequence
  Chemically synthesized ABT1-137
gaggtgcagctgttggagtctgggggaggcttggtacagcctggggggtccctgcgtctctcctgtgcagcctccggattcacctttgagaggtattggatggcttgggtccgccaggctccagggaagggtctagagtgggtctcaaatattaatcttactggtagtgcgacatactacgcagactccgtgaagggccggttcaccatctcccgcgacaattccaagaacacgctgtatctgcaaatgaacagcctgcgtgccgaggataccgcggtatattactgtgcgaaaggggcttttcagtttgactactggggtcagggaaccctggtcaccgtctcgagc

SEQ ID NO: 199 - DNA, 360 bp, Artificial Sequence
  Chemically synthesized ABT1-139
gaggtgcagctgttggagtctgggggaggcttggtacagcctggggggtccctgcgtctctcctgtgcagcctccggatttaccttttctgattatacgatgatttgggtccgccaggctccagggaagggtctggagtgggtctcatctatttcggctcgtggttggggtacatactacgcagactccgtgaagggccggttcaccatctcccgcgacaattccaagaacacgctgtatctgcaaatgaacagcctgcgtgccgaggacaccgcggtatattactgtgcgaaaggtagtcctcagcttgttctgccttttgactactggggtcagggaaccctggtcaccgtctcgagc

SEQ ID NO: 200 - DNA, 363 bp, Artificial Sequence
  Chemically synthesized ABT1-140
gaggtgcagctgttggagtctgggggaggcttggtacagcctggggggtccctgcgtctctcctgtgcagcctccggattcacctttgaggattatgagatggattgggtccgccaggctccagggaagggtctagagtgggtctcaactatttctcctcatggtctgcttacatactacgcagactccgtgaagggccggttcaccatctcccgcgacaattccaagaacacgctgtatctgcaaatgaacagcctgcgtgccgaggacaccgcggtatattactgtgcgaaacgtttgtggcctcagaggaagtggacttttgactactggggtcagggaaccctggtcaccgtctcgagc

SEQ ID NO: 201 - DNA, 360 bp, Artificial Sequence
  Chemically synthesized ABT1-147
gaggtgcagctgttggagtctgggggaggcttggtacagcctggggggtccctgcgtctctcctgtgcagcctccggattcaccttttctacttataatatgatgtgggtccgccaggctccagggaagggtctagagtgggtctcaagtattacgcatgagggtacgatgacatactacgcagactccgtgaagggccggttcaccatctcccgcgacaattccaagaacacgctgtatctgcaaatgaacagcctgcgtgccgaggacaccgcggtatattactgtgcgaaaaatggtcgtattagtcagaatcggtttgactactggggtcagggaaccctggtcaccgtctcgagc

SEQ ID NO: 202 - DNA, 324 bp, Artificial Sequence
  Chemically synthesized ABT1 VK dAbs:ABT1-3
gacatccagatgacccagtctccatcctccctgtctgcatctgtaggagaccgtgtcaccatcacttgccgggcaagtcagagcatttggacggagttaaagtggtaccagcagaaaccagggaaagcccctaagctcctgatctatggtgcatccctgttgcaaagtggggtcccatcacgtttcagtggcagtggatctgggacagatttcactctcaccatcagcagtctgcaacctgaagattttgctacgtactactgtcaacagtttgcgtattttccttttacgttcggccaagggaccaaggtggaaatcaaacgg

SEQ ID NO: 203 - DNA, 324 bp, Artificial Sequence
  Chemically synthesized ABT1-9
gacatccagatgacccagtctccatcctccctgtctgcatctgtaggagaccgtgtcaccatcacttgccgggcaagtcagagcattggttcgtcgttactttggtaccagcagaaaccagggaaagcccctaagctcctgatctatttggcatcccgtttgcaaagtggggtcccatcacgtttcagtggcagtggatctgggacagacttcactctcaccatcagcagtctgcaacctgaagattttgctacgtactactgtcaacagtttcggtctacgcctaatacgttcggccaagggaccaaggtggaaatcaaacgg

SEQ ID NO: 204 - DNA, 324 bp, Artificial Sequence
  Chemically synthesized ABT1-9-500
gatattcagatgacccagagcccgagcagcctgagcgcgagcgtgggcgatcgtgtgaccattacctgccgtgcgagccatcgtattcaggtgagcctgaactggtatcagcgtaaaccgggcaaagcgccgaaactgctggtgtatctggcgagccgtctgcagagcggcgtgccgagccgttttagcggcagcggcagcggcagcgattttaccctgaccattagcagcctgcagccgggcgattttgcgacctattattgccagcagtttcgtagcaccccgaacacctttggccagggcaccaaagtggaaattcgtcgt

SEQ ID NO: 205 - DNA, 324 bp, Artificial Sequence
  Chemically synthesized ABT1-10
gacatccagatgacccagtctccatcctccctgtctgcatctgtaggagaccgtgtcaccatcacttgccgggcaagtcagagcattgtgccgaatttaaggtggtaccagcagaaaccagggaaagcccctaagctcctgatctatggtgcatccacgttgcaaagtggggtcccatcacgtttcagtggcagtggatctgggacagatttcactctcaccatcagcagtctgcaacctgaagattttgctacgtactactgtcaacagggttatgtttatcctgggacgttcggccaagggaccaaggtggaaatcaaacgg

SEQ ID NO: 206 - DNA, 324 bp, Artificial Sequence
  Chemically synthesized ABT1-11
gacatccagatgacccagtctccatcctccctgtctgcatctgtaggagaccgtgtcaccatcacttgccgggcaagtcagagcattccgtataatttacgttggtaccagcagaaaccagggaaagcccctaagctcctgatctatagtgcatcccggttgcaaagtggggtcccatcacgtttcagtggcagtggatctgggacagatttcactctcaccatcagcagtctgcaacctgaagattttgctacgtactactgtcaacaggggtatagttggcctatgacgttcggccaagggaccaaggtggaaatcaaacgg

SEQ ID NO: 207 - DNA, 324 bp, Artificial Sequence; identical to SEQ ID NO: 202
  Chemically synthesized ABT1-12

SEQ ID NO: 208 - DNA, 324 bp, Artificial Sequence
  Chemically synthesized ABT1-13
gacatccagatgacccagtctccatcctccctgtctgcatctgtaggagaccgtgtcaccatcacttgccgggcaagtcagagcattcgtacttttttaaattggtaccagcagaaaccagggaaagcccctaagctcctgatctattgggcatcccctttgcaaagtggggtcccatcacgtttcagtggcagtggatctgggacagatttcactctcaccatcagcagtctgcaacctgaagattttgctacgtactactgtcaacagactagtcgggctccttatacgttcggccaagggaccaaggtggaaatcaaacgg

SEQ ID NO: 209 - DNA, 324 bp, Artificial Sequence; identical to SEQ ID NO: 202
  Chemically synthesized ABT1-14

SEQ ID NO: 210 - DNA, 324 bp, Artificial Sequence
  Chemically synthesized ABT1-18
gacatccagatgacccagtctccatcctccctgtctgcatctgtaggagaccgtgtcaccatcacttgccgggcaagtcagagcattcagcgttggttagcttggtaccagcagaaaccagggaaagcccctaagctcctgatctattttgcatcccagttgcaaagtggggtcccatcacgtttcagtggcagtggatctgggacagatttcactctcaccatcagcagtctgcaacctgaagattttgctacgtactactgtcaacagttgctgaggttgcctaagacgttcggccaagggaccaaggtggaaatcaaacgg

SEQ ID NO: 211 - DNA, 324 bp, Artificial Sequence
  Chemically synthesized ABT1-24
gacatccagatgacccagtctccatcctccctgtctgcatctgtaggagaccgtgtcaccatcacttgccgggcaagtcagagcattagggctaagttacgttggtaccagcagaaaccagggaaagcccctaagctcctgatctatagggcatcccagttgcaaagtggggtcccatcacgtttcagtggcagtggatctgggacagatttcactctcaccatcagcagtctgcaacctgaagattttgctacgtactactgtcaacagagggctcggcatcctcatacgttcggccaagggaccaaggtggaaatcaaacgg

SEQ ID NO: 212 - DNA, 324 bp, Artificial Sequence
  Chemically synthesized ABT1-25
gacatccagatgacccagtctccatcctccctgtctgcatctgtaggagaccgtgccaccatcacttgccgggcaagtcagagcattagggctaagttacgttggtaccagcagaaaccagggaaagcccctaagctcctgatctatagggcatcccagttgcaaagtggggtcccatcacgtttcagtggcagtggatctgggacagatttcactctcaccatcagcagtctgcaacctgaagattttgctacgtactactgtcaacagagggctcggcatcctcatacgttcggccaagggaccaaggtggaaatcaaacgg

SEQ ID NO: 213 - DNA, 324 bp, Artificial Sequence
  Chemically synthesized ABT1-26
gacatccagatgacccagtctccatcctccctgtctgcatccgtaggagaccgtgtcaccatcacttgccgggcaagtcagagcattggtaatgttttacggtggtaccagcagaaaccagggaaagcccctaagctcctgatctatcgtgcagccatgttgcaaagtggggtcccatcacgtttcagtggcagtggatctgggacagatttcactctcaccatcagcagtctgcaacctgaagattttgctacgtactactgtcaacagaggcggacttatccttggacgttcggccaagggaccaaggtggaaatcaaacgg

SEQ ID NO: 214 - DNA, 324 bp, Artificial Sequence
  Chemically synthesized ABT1-27
gacatccagatgacccagtctccatcctccctgtctgcatctgtaggagaccgtgtcaccatcacttgccgggcaagtcagagcattaagcagaagttaaagtggtaccagcagaaaccagggaaagcccctaagctcctgatctattgggcatcccatttgcaaagtggggtcccatcacgtttcagtggcagtggatctgggacagatttcactctcaccatcagcagtctgcaacctgaagattttgctacgtactactgtcaacagcggcatctgaagccttatacgttcggccaagggaccaaggtggaaatcaaacgg

SEQ ID NO: 215 - DNA, 324 bp, Artificial Sequence
  Chemically synthesized ABT1-28
gacatccagatgacccagtctccatcctccctgtctgcatctgtaggagaccgtgtcaccatcacttgccgggcaagtcagagcattaagaatcggttacgttggtaccagcagaaaccagggaaagcccctaagctcctgatctatcgtgcatccaagttgcaaagtggggtcccatcacgtttcagtggcagtggatctgggacagatttcactctcaccatcagcagtctgcaacctgaagattttgctacgtactactgtcaacagcggtatcatattcctaggacgttcggccaagggaccaaggtggaaatcaaacgg

SEQ ID NO: 216 - DNA, 324 bp, Artificial Sequence
  Chemically synthesized ABT1-29
gacatccagatgacccagtctccatcctccctgtctgcatctgtaggagaccgtgtcaccatcacttgccgggcaagtcagagcattcgttctcgtttatcgtggtaccagcagaaaccagggaaagcccctaagctcctgatctatagggcatcccagttgcaaagtggggtcccatcacgtttcagtggcagtggatctgggacagatttcactctcaccatcagcagtctgcaacctgaagattttgctacgtactactgtcaacagcgttttatttggcctaggacgttcggccaagggaccaaggtggaaatcaaacgg

SEQ ID NO: 217 - DNA, 324 bp, Artificial Sequence
  Chemically synthesized ABT1-30
gacatccagatgacccagtctccatcctccctgtctgcatctgtaggagaccgtgtcaccatcacttgccgggcaagtcagagcattaataggggtttaaggtggtaccagcagaaaccagggaaagcccctaagctcctgatctatcgtgcatccgttttgcaaagtggggtcccatcacgtttcagtggcagtggatctgggacagatttcactctcaccatcagcagtctgcaacctgaagattttgctacgtactactgtcaacaggtgagtcgtcgtcctcggacgttcggccaagggaccaaggtggaaatcaaacgg

SEQ ID NO: 218 - DNA, 324 bp, Artificial Sequence
  Chemically synthesized ABT1-53
gacatccagatgacccagtctccatccaccctgtctgcatctgtaggagaccgtgtcaccatcacttgccgggcaagtcagagcattagggctaagttacgttggtaccagcagaaaccagggaaggcccctaagctcctgatctataaggcatcccggttgcaaagtggggtcccatcacgtttcagtggcagtggatctgggacagatttcactctcaccatcagcagtctgcaacctgaagattttgctacgtactactgtcaacagcgtgggcttcttccttttacgttcggccaagggaccaaggtagaaatcaaacgg

SEQ ID NO: 219 - DNA, 324 bp, Artificial Sequence
  Chemically synthesized ABT1-54
gacatccagatgacccagtctccatcctccctgtctgcatctgtaggagaccgtgtcaccatcacttgccgggcaagtcagagcattggtaggaagttacggtggtaccagcagaaaccagggaaagcccctaagctcctgatctatcatgcatccattttgcaaagtggggtcccatcacgtttcagtggcagtggatctgggacagatttcactctcaccatcagcagtctgcaacctgaagattttgctacgtactactgtcaacagagggttcgtatgccttttacgttcggccaagggaccaaggtggaaatcaaacgg

SEQ ID NO: 220 - DNA, 324 bp, Artificial Sequence
  Chemically synthesized ABT1-56
gacatccagatgacccagtctccatcctccctgtctgcatctgtaggagaccgtgtcaccatcacttgccgggcaagtcagagcattaagactcgtttacagtggtaccagcagaaaccagggaaagcccctaagctcctgatctatcatgcatccgtgttgcaaagtggggtcccatcacgtttcagtggcagtggatctgggacagatttcactctcaccatcagcagtctacaacctgaagattttgctacgtactactgtcaacagcggaagatgcgtcctcatacgttcggccaagggaccaaggtggaaatcaaacgg

SEQ ID NO: 221 - DNA, 324 bp, Artificial Sequence
  Chemically synthesized ABT1-57
gacatccagatgacccagtctccatcctccctgtctgcatctgtaggagaccgtgtcaccatcacttgccgggcaagtcagagcattaagcgtgagttagcgtggtaccagcagaaaccagggaaagcccctaagctcctgatctataaggcatcccggttgcaaagtggggtcccatcacgtttcagtggcagtggatctgggacagatttcactctcaccatcagcagtctgcaacctgaagattttgctacgtactactgtcaacagaggaagtcgcatcctcggacgttcggccaagggaccaaggtggaaatcaaacgg

SEQ ID NO: 222 - DNA, 324 bp, Artificial Sequence
  Chemically synthesized ABT1-59
gacatccagatgacccagtctccatcctccctgtctgcatctgtaggagaccgtgtcaccatcacttgccgggcaagtcagagcattgggcggcgtttagcttggtaccagcagaaaccagggaaagcccctaagctcctgatctattgggcatccaagttgcaaagtggggtcccatcacgtttcagtggcagtggatctgggacagatttcactctcaccatcagcagtctgcaacctgaagattttgctacgtactactgtcaacaggggaatgtgtggccttatacgttcggccaagggaccaaggtggaaatcaaacgg

SEQ ID NO: 223 - DNA, 324 bp, Artificial Sequence
  Chemically synthesized ABT1-60
gacatccagatgacccagtctccatcctccctgtctgcatctgtaggagaccgtgtcaccatcacttgccgggcaagtcagagcattggtcgtcgtttaaagtggtaccagcagaaaccagggaaagcccctaagctcctgatctataaggcatccaggttgcaaagtggggtcccatcacgtttcagtggcagtggatctgggacagatttcactctcaccatcagcagtctgcaacctgaagattttgctacgtactactgtcaacagaatagtcatcatccttatacgttcggccaagggaccaaggtggaaatcaaacgg

SEQ ID NO: 224 - DNA, 324 bp, Artificial Sequence
  Chemically synthesized ABT1-61
gacatccagatgacccagtctccatcctccctgtctgcatctgtaggagaccgtgtcaccatcacttgccgggcaagtcagagcattgggcatcgtttaaggtggtaccagcagaaaccagggaaagcccctaagctcctgatctataaggcatccctgttgcaaagtggggtcccatcacgtttcagtggcagtggatctgggacagatttcactctcaccatcagcagtctgcaacctgaagattttgctacgtactactgtcaacaggtgcgtgcgtatcctcgtacgttcggccaagggaccaaggtggaaatcaaacgg

SEQ ID NO: 225 - DNA, 324 bp, Artificial Sequence
  Chemically synthesized ABT1-62
gacatccagatgacccagtctccatcccccctgtctgcatctgtaggagaccgtgtcaccatcacttgccgggcaagtcagagcattccgttttatttagggtggtaccagcagaaaccagggaaagcccctaagctcctgatctatagggcatccatgttgcaaagtggggtcccatcacgtttcagtggcagtggatctgggacagatttcactctcaccatcagcagtctgcaacctgaagattttgctacgtactactgtcaacagattcttcaggctcctccgacgttcggccaagggaccaaggtggaaatcaaacgg

SEQ ID NO: 226 - DNA, 324 bp, Artificial Sequence
  Chemically synthesized ABT1-63
gacatccagatgacccagtctccatcctccctgtctgcatctgtaggagaccgtgtcaccatcacttgccgggcaagtcagagcattggtgcgtttttaggttggtaccagcagaaaccagggaaagcccctaagctcctgatctatcgggcatcccctttgcaaagtggggtcccatcacgtttcagtggcggtggatctgggacagatttcactctcaccatcagcagtctgcaacctgaagattttgctacgtactactgtcaacagcagcgtgtggttcctgggacgttcggccaagggaccaaggtggaaatcaaacgg

SEQ ID NO: 227 - DNA, 324 bp, Artificial Sequence
  Chemically synthesized ABT1-64
gacatccagatgacccagtctccatcctccctgtctgcatctgtaggagaccgtgtcaccatcacttgccgggcaagtcagagcatttcgaaggtgttaggttggtaccagcagaaaccagggaaagcccctaagctcctgatctataaggcatccattttgcaaagtggggtcccatcacgtctcagtggcagtggatctgggacagatttcactctcaccatcagcagtctgcaacctgaagattttgctacgtactactgtcaacaggcgcttgattttccttatacgttcggccaagggaccaaggtggaaatcaaacgg

SEQ ID NO: 228 - DNA, 324 bp, Artificial Sequence
  Chemically synthesized ABT1-65
gacatccagatgacccagtctccatcctccctgtctgcatctgtaggagaccgtgtcaccatcacttgccgggcaagtcagagcattagcagctatttaaattggtaccagcagaaaccagggaaagcccctaagctcctgatctatgctgcatccagtttgcaaagtggggtcccatcacgtttcagtggcagtggatctgggacagatttcactctcaccatcagcagtctgcaacctgaagattttgctacgtactactgtcaacaggattatgattttcctattacgttcggccaagggaccaaggtggaaatcaaacgg

SEQ ID NO: 229 - DNA, 324 bp, Artificial Sequence
  Chemically synthesized ABT1-66
gacatccagatgacccagtctccatcctccctgtctgcatctgtaggagaccgtgtcaccatcacttgccgggcaagtcagagcattatgcggaagttaaggtggtaccagcagaaaccagggaaagcccctaagctcctgatctataaggcatccaagttgcaaagtggggtcccatcacgtttcagtggcagtggatctgggacagatttcactctcaccatcagcagtctgcaacctgaagattttgctacgtactactgtcaacagagtcatcggaggccttatacgttcggccaagggaccaaggtggaaatcaaacgg

SEQ ID NO: 230 - DNA, 324 bp, Artificial Sequence
  Chemically synthesized ABT1-67
gacatccagatgacccagtctccatcctccctgtctgcatctgtaggagaccgtgtcaccatcacttgccgggcaagtcagagcattcatcgttctttacgttggtaccagcagaaaccagggaaagcccctaagctcctgatctatcatgcatcccatttgcaaagtggggtcccatcacgtttcagtggcagtggatctgggacagatttcactctcaccatcagcagtctgcaacctgaagattttgctacgtactactgtcaacagtataagcggcgtccttctacgttcggccaagggaccaaggtggaaatcaaacgg

SEQ ID NO: 231 - DNA, 324 bp, Artificial Sequence
  Chemically synthesized ABT1-68
gacatccagatgacccagtctccatcctccctgtctgcatctgtaggagaccgtgtcaccatcacttgccgggcaagtcagagcattcataagcagttaacgtggtaccagcagaaaccagggaaagcccctaagctcctgatctatagggcatcccggttgcaaagtggggtcccatcacgtttcagtggcagtggatctgggacagatttcactctcaccatcagcagtctgcaacctgaagattttgctacgtactactgtcaacagtatcatcataggccttcaacgttcggccaagggaccaaggtggaaatcaaacgg

SEQ ID NO: 232 - DNA, 324 bp, Artificial Sequence
  Chemically synthesized ABT1-82
gacatccagatgacccagtctccatcctccctgtctgcatctgtaggagaccgtgtcaccatcacttgccgggcaagtcagagcattgggaagtcgttacggtggtaccagcagaaaccagggaaagcccctaagctcctgatctatcgtgcatcctatttgcaaagtggggtcccatcacgtttcagtggcagtggatctgggacagatttcactctcaccatcagcagtctgcaacctgaagattttgctacgtactactgtcaacaggttatgtttgggcctcgtacgttcggccaagggaccaaggtggaaatcaaacgg

SEQ ID NO: 233 - DNA, 324 bp, Artificial Sequence
  Chemically synthesized ABT1-95
gacatccagatgacccagtctccatcctccctgtctgcatctgtaggagaccgtgtcaccatcacttgccgggcaagtcagccgattcatgggaatttacgttggtatcagcagaaaccagggaaagcccctaagctcctgatctataatatttccaatttgcaaagtggggtcccatcacgtttcagtggcagtggatctgggacagatttcactctcaccatcagcagtctgcaacctgaagattttgctacgtactactgtcaacaggggtatcgttggcctgttacgttcggccaagggaccaaggtggaaatcaaacgg

SEQ ID NO: 234 - DNA, 324 bp, Artificial Sequence
  Chemically synthesized ABT1-95-3
gacatccagatgacccagtctccatcctccctgtctgcatctgtaggagaccgtgtcaccatcacttgccgggcaagtcagccgattcatgggaatttacgttggtatcagcagaaaccagggaaagcccctaagctcctgatctattcttcgtcctatttgcaaagtggggtcccatcacgtttcagtggcagtggatctgggacagatttcactctcaccatcagcagtctgcaacctgaagattttgctacgtaccactgtcaacaggggtatcgttggcctgttacgttcggccaagggaccaaggtggaaatcaaacgg

SEQ ID NO: 235 - DNA, 324 bp, Artificial Sequence
  Chemically synthesized ABT1-95-4
gacatccagatgacccagtctccatcctccctgtctgcatctgtaggagaccgtgtcaccatcacttgccgggcaagtcagccgattgtgcgcaacttaaggtggtatcagcagaaaccagggaaagcccctaagctcctgatctattcttcgtcctatttgcaaagtggggtcccatcacgtttcagtggtagtggatccgggacagatttcactctcaccatcagcagtctgcaacctgaagattttgctacgtaccactgtcaacaggggtatcgttggcctgttacgttcggccaagggaccaaggtggaaatcaaacgg

SEQ ID NO: 236 - DNA, 324 bp, Artificial Sequence
  Chemically synthesized ABT1-95-6
gacatccagatgacccagtcaccatcctctctgtctgcatctgtaggagaccgtgtcaccatcacttgccgggcaagtcagccgattcaggggaatttacgttggtatcagcagaaaccagggaaggcccctaagctcctgatctattcttcgtcctatttggaaagtggggtcccatcacgtttcagtggtagtggatccgggacagatttcactctcaccatcagcagtctgcaacctgaagattttgctacgtaccactgtcaacaggggtatcgttggcctgttacgttcggccaagggaccaaggtggaaatcaaacgg

SEQ ID NO: 237 - DNA, 324 bp, Artificial Sequence
  Chemically synthesized ABT1-95-8
gacatccagatgacccagtcaccatcctctctgtctgcatctgtaggagaccgtgtcaccatcacttgccgggcaagtcagccgattcaggggaatttacgttggtatcagcagaaaccagggaaagcccctaagctcctgatctattcttcgtcctatttggaaagaggggtcccatcacgtttcagtggtagtggatccgggacagatttcactctcaccatcagcagtctgcaacctgaagattttgctacgtaccactgtcaacaggggtatcgttggcctgttacgttcggccaagggaccaaggtggaaatcaaacgg

SEQ ID NO: 238 - DNA, 324 bp, Artificial Sequence
  Chemically synthesized ABT1-95-9
gacatccagatgacccagtcaccatcctctctgtctgcatctgtaggagaccgtgtcaccatcacttgccgggcaagtcagccgattcaggggaatttacgttggtatcagcagaaaccagggaaagcccctaagctcctgatctattcttcgtcctatttggaaagaggggtcccatcacgtttcagtggtagtggatccgggacagatttcactctcaccatcagcagtctgcatcctgaagattttgctacgtaccactgtcaacaggggtatcgttggcctgttacgttcggccaagggaccaaggtggaaatcaaacgg

SEQ ID NO: 239 - DNA, 324 bp, Artificial Sequence
  Chemically synthesized ABT1-95-10
gacatccagatgacccagtcaccatcctctctgtctgcatctgtaggagaccgtgtcaccatcacttgccgggcaagtcagccgattcaggggaatttacgttggtatcagcagaaaccagggaaagcccctaagctcctgatctattcttcgtcctatttggaaagaggggtcccatcacgtttcagtggtagtggatccgggacagatttcactctcaccatcagcagtctgcatcctgaagatcttgctacgtaccactgtcaacaggggtatcgttggcctgttacgttcggccaagggaccaaggtggaaatcaaacgg

SEQ ID NO: 240 - DNA, 324 bp, Artificial Sequence
  Chemically synthesized ABT1-95-11
gacatccagatgacccagtcaccatcctctctgtctgcatctgtaggagaccgtgtcaccatcacttgccgggcaagtcagccgattcaggggaatttacgttggtatcagcagaaaccagggatagcccctaagctcctgatctattcttcgtcctatttggaaagaggggtcccatcacgtttcagtggtagtggatccgggacagatttcactctcaccatcagcagtctgcatcctgaagatcttgctacgtaccactgtcaacaggggtatcgttggcctgttacgttcggccaagggaccaaggtggaaatcaaacgg

SEQ ID NO: 241 - DNA, 324 bp, Artificial Sequence
  Chemically synthesized ABT1-95-12
gacatccagatgacccagtctccatcctccctgtctgcatctgtaggagaccgtgtcaccatcacttgccgggcaagtcagccgattcatgggaatttacgttggtatcagcagaaaccagggaaagcccctaagctcctgatctattcttcgtcctatttggaaagttgggtcccatcacgtttcagtggtagtggatccgggacagatttcactctcaccatcagcagtctgcaacctgaagattttgctacgtaccactgtcaacaggggtatcgttggcctgttacgttcggccaagggaccaaggtggaaatcaaacgg

SEQ ID NO: 242 - DNA, 324 bp, Artificial Sequence
  Chemically synthesized ABT1-95-13
gacatccagatgacccagtctccatcctccctgtctgcatctgtaggagaccgtgtcaccatcacttgccgggcaagtcagccgattgtgcgcaacttaaggtggtatcagcagaaaccagggaaagcccctaagctcctgatctattcttcgtcctatttggaaagaggggtcccatcacgtttcagtggtagtggatccgggacagatttcactctcaccatcagcagtctgcaacctgaagattttgctacgtaccactgtcaacaggggtatcgttggcctgttacgttcggccaagggaccaaggtggaaatcaaacgg

SEQ ID NO: 243 - DNA, 324 bp, Artificial Sequence
  Chemically synthesized ABT1-95-14
gacatccagatgacccagtctccatcctccctgtctgcatctgtaggagaccgtgtcaccatcacttgccgggcaagtcagccgattgtgaagaacttaaggtggtatcagcagaaaccagggaaagcccctaagctcctgatctattcttcgtcctatttggaaagaggggtcccatcacgtttcagtggtagtggatccgggacagatttcactctcaccatcagcagtctgcaacctgaagattttgctacgtaccactgtcaacaggggtatcgttggcctgttacgttcggccaagggaccaaggtggaaatcaaacgg

SEQ ID NO: 244 - DNA, 324 bp, Artificial Sequence
  Chemically synthesized ABT1-95-15
gacatccagatgacccagtctccatcctccctgtctgcatctgtaggagaccgtgtcaccatcacttgccgggcaagtcagccgattgtgcggaacttaaggtggtatcagcagaaaccagggaaagcccctaagctcctgatctattcttcgtcctatttggagcccggggtcccatcacgtttcagtggtagtggatccgggacagatttcactctcaccatcagcagtctgcaacccgaagattttgctacgtaccactgtcaacaggggtatcgttggcctgttacgttcggccaagggaccaaggtggaaatcaaacgg

SEQ ID NO: 245 - DNA, 324 bp, Artificial Sequence
  Chemically synthesized ABT1-95-21
gacatccagatgacccagtctccatcctccctgtctgcatctgtaggagaccgtgtcaccatcacttgccgggcaagtcagccgattgtgcggaacttaaggtggtatcagcagaaaccagggaaagcccctaagctcctgatctattcttcgtcctatttggagcccggggtcccatcacgtttcagtggtagtggatccgggacagatttcactctcaccatcagcagtctgcaacccgaagattttgctacgtactactgtcaacaggggtatcgttggcctgttacgttcggccaagggaccaaggtggaaatcaaacgg

SEQ ID NO: 246 - DNA, 324 bp, Artificial Sequence
  Chemically synthesized ABT1-95-22
gacatccagatgacccagtctccatcctccctgtctgcatctgtaggagaccgtgtcaccatcacttgccgggcaagtcagccgattgtgcggaacttaaggtggtatcagcagaaaccagggaaagcccctaagctcctgatctattcttcgtcctatttggagcccggggtcccatcacgtttcagtggtagtggatccgggacagatttcactctcaccatcagcagtctgcaacccgaagattttgctacgtactactgtcaacaggggtatcactggcctgttacgttcggccaagggaccaaggtggaaatcaaacgg

SEQ ID NO: 247 - DNA, 324 bp, Artificial Sequence
  Chemically synthesized ABT1-95-23
gacatccagatgacccagtctccatcctccctgtctgcatctgtaggagaccgtgtcaccatcacttgccgggcaagtcagccgactgtgcggaacctaaggtggtatcagcagaaaccagggaaagcccctaagctcctgatctattcttcgtcctatttggagcccggggtcccatcacgtttcagtggtagtggatccgggacagatttcactctcaccatcagcagtctgcaacccgaagattttgctacgtactactgtcaacaggggtaccgttggcctgttacgttcggccaagggaccaaggtggaaatcaaacgg

SEQ ID NO: 248 - DNA, 324 bp, Artificial Sequence
  Chemically synthesized ABT1-95-24
gacatccagatgacccagtctccatcctccctgtctgcatctgtaggagaccgtgtcaccatcacttgccgggcaagtcagccgattgtgcggaacttaaggtggtatcagcagaaaccagggaaagcccctaagctcctgatctattcttcgtcctatttggagcccggggtcccatcacgtttcagtggtagtggatccgggacagatttcactctcaccatcagcagtctgcaacccgaagattttgctacgtactactgttgccaggggtatcgttggcctgttacgttcggccaagggaccaaggtggaaatcaaacgg

SEQ ID NO: 249 - DNA, 324 bp, Artificial Sequence
  Chemically synthesized ABT1-95-25
gacatccagatgacccagtctccatcctccctgtctgcatctgtaggagaccgtgtcaccatcacttgccgggcaagtcagccgattgtgcggaacttaaggtggtatcagcagaaaccagggaaagcccctaagctcctgatctattcttcgtcctatttggagcccggggtcccatcacgtttcagtggtagtggatccgggacagatttcactctcaccatcagcagtctgcaacccgaagattttgctacgtactactgtgaccaggggtatcgttggcctgttacgttcggccaagggaccaaggtggaaatcaaacgg

SEQ ID NO: 250 - DNA, 324 bp, Artificial Sequence
  Chemically synthesized ABT1-95-26
gacatccagatgacccagtctccatcctccctgtctgcatctgtaggagaccgtgtcaccatcacttgccgggcaagtcagccgattgtgcggaacttaaggtggtatcagcagaaaccagggaaagcccctaagctcctgatctattcttcgtcctatttggagcccggggtcccatcacgtttcagtggtagtggatccgggacagatttcactctcaccatcagcagtctgcaacccgaagattttgctacgtactactgtggccaggggtatcgttggcctgttacgttcggccaagggaccaaggtggaaatcaaacgg

SEQ ID NO: 251 - DNA, 324 bp, Artificial Sequence
  Chemically synthesized ABT1-95-27
gacatccagatgacccagtctccatcctccctgtctgcatctgtaggagaccgtgtcaccatcacttgccgggcaagtcagccgattgtgcggaacttaaggtggtatcagcagaaaccaaggaaagcccctaagctcctgatctattcttcgtcctatttggagcccggggtcccatcacgtttcagtggtagtggatccgggacagatttcactctcaccatcagcagtctgcaacccgaagattttgctacgtactactgtgcgcaggggtatcgttggcctgttacgttcggccaagggaccaaggtggaaatcaaacgg

SEQ ID NO: 252 - DNA, 324 bp, Artificial Sequence
  Chemically synthesized ABT1-95-28
gacatccagatgacccagtctccatcctccctgtctgcatctgtaggagaccgtgtcaccatcacttgccgggcaagtcagccgattgtgcggaacttaaggtggtatcagcagaaaccagggaaagcccctaagctcctgatctattcttcgtcctatttggagcccggggtcccatcacgtttcagtggtagtggatccgggacagatttcactctcaccatcagcagtctgcaacccgaagattttgctacgtactactgtcaacaggggtatggctggcctgttacgttcggccaagggaccaaggtggaaatcaaacgg

SEQ ID NO: 253 - DNA, 324 bp, Artificial Sequence
  Chemically synthesized ABT1-95-29
gacatccagatgacccagtctccatcctccctgtctgcatctgtaggagaccgtgtcaccatcacttgccgggcaagtcagccgattgtgcggaacttaaggtggtatcagcagaaaccagggaaagcccctaagctcctgatctattcttcgtcctatttggagcccggggtcccatcacgtttcagtggtagtggatccgggacagatttcactctcaccatcagcagtctgcaacccgaagattttgctacgtactactgtcaacaggggtatcagtggcctgttacgttcggccaagggaccaaggtggaaatcaaacgg

SEQ ID NO: 254 - DNA, 324 bp, Artificial Sequence
  Chemically synthesized ABT1-95-30
gacatccagatgacccagtctccatcctccctgtctgcatctgtaggagaccgtgtcaccatcacttgccgggcaagtcagccgattgtgcggaacttaaggtggtatcagcagaaaccagggaaagcccctaagctcctgatctattcttcgtcctatttggagcccggggtcccatcacgtttcagtggtagtggatccgggacagatttcactctcaccatcagcagtctgcaacccgaagattttgctacgtactactgtcaacagtcctatcgttggcctgttacgttcggccaagggaccaaggtggaaatcaaacgg

SEQ ID NO: 255 - DNA, 324 bp, Artificial Sequence
  Chemically synthesized ABT1-95-31
gacatccagatgacccagtctccatcctccctgtctgcatctgtaggagaccgtgtcaccatcacttgccgggcaagtcagccgattgtgcggaacttaaggtggtatcagcagaaaccagggaaagcccctaagctcctgatctattcttcgtcctatttggagcccggggtcccatcacgtttcagtggtagtggatccgggacagatttcactctcaccatcagcagtctgcaacccgaagattttgctacgtactactgtcaacaggggtatctgtggcctgttacgttcggccaagggaccaaggtggaaatcaaacgg

SEQ ID NO: 256 - DNA, 324 bp, Artificial Sequence
  Chemically synthesized ABT1-95-32
gacatccagatgacccagtctccatcctccctgtctgcatctgtaggagaccgtgtcaccatcacttgccgggcaagtcagccgattgtgcggaacttaaggtggtatcagcagaaaccagggaaagcccctaagctcctgatctattcttcgtcctatttggagcccggggtcccatcacgtttcagtggtagtggatccgggacagatttcactctcaccatcagcagtctgcaacccgaagattttgctacgtactactgtcaacaggggtattcctggcctgttacgttcggccaagggaccaaggtggaaatcaaacgg

SEQ ID NO: 257 - DNA, 324 bp, Artificial Sequence
  Chemically synthesized ABT1-95-33
gacatccagatgacccagtctccatcctccctgtctgcatctgtaggagaccgtgtcaccatcacttgccgggcaagtcagccgattgtgcggaacttaaggtggtatcagcagaaaccagggaaagcccctaagctcctgatctattcttcgtcctatttggagcccggggtcccatcacgtttcagtggtagtggatccgggacagatttcactctcaccatcagcagtctgcaacccgaagattttgctacgtactactgtcgccaggggtatcgttggcctgttacgttcggccaagggaccaaggtggaaatcaaacgg

SEQ ID NO: 258 - DNA, 324 bp, Artificial Sequence
  Chemically synthesized ABT1-95-34
gacatccagatgacccagtctccatcctccctgtctgcatctgtaggagaccgtgtcaccatcacttgccgggcaagtgcgccgattgtgcggaacttaaggtggtatcagcagaaaccagggaaagcccctaagctcctgatctattcttcgtcctatttggagcccggggtcccatcacgtttcagtggtagtggatccgggacagatttcactctcaccatcagcagtctgcaacccgaagattttgctacgtaccactgtcaacaggggtatcgttggcctgttacgttcggccaagggaccaaggtggaaatcaaacgg

SEQ ID NO: 259 - DNA, 324 bp, Artificial Sequence
  Chemically synthesized ABT1-95-35
gacatccagatgacccagtctccatcctccctgtctgcatctgtaggagaccgtgtcaccatcacttgccgggcaagtgggccgattgtgcggaacttaaggtggtatcagcagaaaccaggaaaagcccctaagctcctgatctattcttcgtcctatttggagcccggggtcccatcacgtttcagtggtagtggatccgggacagatttcactctcaccatcagcagtctgcaacccgaagattttgctacgtaccactgtcaacaggggtatcgttggcctgttacgttcggccaagggaccaaggtggaaatcaaacgg

SEQ ID NO: 260 - DNA, 324 bp, Artificial Sequence
  Chemically synthesized ABT1-95-36
gacatccagatgacccagtctccatcctccctgtctgcatctgtaggagaccgtgtcgccatcacttgccgggcaagtcagccgattgtgcggaacttaaggtggtatcagcagaaaccagggaaagcccctaagctcctgatctattcttcgtcctatttggagcccggggtcccatcacgtttcagtggtagtggatccgggacagatttcactctcaccatcagcagtctgcaacccgaagattttgctacgtaccactgtcaacaggggtatcgttggcctgttacgttcggccaagggaccaaggtggaaatcaaacgg

SEQ ID NO: 261 - DNA, 324 bp, Artificial Sequence; identical to SEQ ID NO: 244
  Chemically synthesized ABT1-95-37

SEQ ID NO: 262 - DNA, 324 bp, Artificial Sequence
  Chemically synthesized ABT1-95-38
gacatccagatgacccagtctccatcctccctgcctgcatctgtaggagaccgtgtcaccatcacttgccgggcaagtcagccgattgtgcggaacttaaggtggtatcagcagaaaccagggaaagcccccaagctcctgatctattcttcgtcctatttggagcccggggtcccatcacgtttcagtggtagtggatccgggacagatttcactctcaccatcagcagtctgcaacccgaagattttgctacgtaccactgtcaacaggggtatcgttggcctgttacgttcggccaagggaccaaggtggaaatcaaacgg

SEQ ID NO: 263 - DNA, 324 bp, Artificial Sequence
  Chemically synthesized ABT1-95-39
gacatccagatgacccagtctccatcctccctgtctgcatctgtaggagaccgtgtcaccatcacttgccgggcaagtcagccgattgtgcggaacttaaggtggtatcagcagaaaccagggaaagcccctaagctcctgatctattcttcgtcctatttggagcccggggtcccatcacgtttcagtggtagtggatccgggacagatttcactctcaccatcagcggtctgcaacccgaagattttgctacgtaccactgtcaacaggggtatcgttggcctgttacgttcggccaagggaccaaggtggaaatcaaacgg

SEQ ID NO: 264 - DNA, 324 bp, Artificial Sequence
  Chemically synthesized ABT1-95-40
gacatccagatgacccagtctccatcctccctgtctgcatctgtaggagaccgtgtcaccatcacttgccgggcaagtcccccgattgtgcggaacttaaggtggtatcagcagaaaccagggaaagcccctaagctcctgatctattcttcgtcctatttggagcccggggtcccatcacgtttcagtggtagtggatccgggacagatttcactctcaccatcagcagtctgcaacccgaagattttgctacgtaccactgtcaacaggggtatcgttggcctgttacgttcggccaagggaccaaggtggaaatcaaacgg

SEQ ID NO: 265 - DNA, 324 bp, Artificial Sequence
  Chemically synthesized ABT1-95-41
gacatccagatgacccagtctccatcctccctgtctgcatctgtaggagaccgtgtcaccatcacttgccgggcaagttacccgattgtgcggaacttaaggtggtatcagcagaaaccagggaaagcccctaagctcctgatctattcttcgtcctatttggagcccggggtcccatcacgtttcagtggtagtggatccgggacagatttcactctcaccatcagcagtctgcaacccgaagattttgctacgtaccactgtcaacaggggtatcgttggcctgttacgttcggccaagggaccaaggtggaaatcaaacgg

SEQ ID NO: 266 - DNA, 324 bp, Artificial Sequence
  Chemically synthesized ABT1-95-42
gacatccagatgacccagtctccatcctccctgtctgcatctgtaggagaccgtgtcaccatcacttgccgggcaagtttcccgattgtgcggaacttaaggtggtatcagcagaaaccagggaaagcccctaagctcctgatctattcttcgtcctatttggagcccggggtcccatcacgtttcagtggtagtggatccgggacagatttcactctcaccatcagcagtctgcaacccgaagattttgccacgtaccactgtcaacaggggtatcgttggcctgttacgttcggccaagggaccaaggtggaaatcaaacgg

SEQ ID NO: 267 - DNA, 324 bp, Artificial Sequence
  Chemically synthesized ABT1-95-43
gacatccagatgacccagtctccatcctccctgtctgcatctgtaggagaccgtgtcaccatcacttgccgggcaagtctcccgattgtgcggaacttaaggtggtatcagcagaaaccagggaaagcccctaagctcctgatctattcttcgtcctatttggagcccggggtcccatcacgtttcagtggtagtggatccgggacagatttcactctcaccatcagcagtctgcaacccgaagattttgctacgtaccactgtcaacaggggtatcgttggcctgttacgttcggccaagggaccaaggtggaaatcaaacgg

SEQ ID NO: 268 - DNA, 324 bp, Artificial Sequence
  Chemically synthesized ABT1-95-44
gacatccagatgacccagtctccatcctccctgtctgcatctgtaggagaccgtgtcaccattacttgccgggcaagttccccgattgtgcggaacttaaggtggtatcagcagaaaccagggaaagcccctaagctcctgatctattcttcgtcctatttggagcccggggtcccatcacgtttcagtggtagtggatccgggacagatttcactctcaccatcagcagtctgcaacccgaagattttgctacgtaccactgtcaacaggggtatcgttggcctgttacgttcggccaagggaccaaggtggaaatcaaacgg

SEQ ID NO: 269 - DNA, 324 bp, Artificial Sequence
  Chemically synthesized ABT1-95-45
gacatccagatgacccagtctccatcctccctgtctgcatctgtaggagaccgtgtcaccatcacttgccgggcaagtcccccgattgtgcggaacttaaggtggtatcagcagaaaccagggaaagcccctaagctcctgatctattcttcgtcctatttggagcccggggtcccatcacgtttcagtggtagtggatccgggacaaatttcactctcaccatcagcagtctgcaacccgaagattttgctacgtaccactgtcaacaggggtatcgttggcctgttacgttcggccaagggaccaaggtggaaatcaaacgg

SEQ ID NO: 270 - DNA, 324 bp, Artificial Sequence
  Chemically synthesized ABT1-95-46
gacatccagatgacccagtctccatcctccctgtctgcatctgtaggagaccgtgtcaccatcacttgccgggcaagttcgccgattgtgcagaacttaaggtggtatcagcagaaaccagggaaagcccctaagctcctgatctattcttcgtcctatttggagcccggggtcccatcacgtttcagtggtagtggatccgggacagatttcactctcaccatcagcagtctgcaacccgaagattttgctacgtaccactgtcaacaggggtatcgttggcctgttacgttcggccaagggaccaaggtggaaatcaaacgg

SEQ ID NO: 271 - DNA, 324 bp, Artificial Sequence
  Chemically synthesized ABT1-95-47
gacatccagatgacccagtctccatcctccctgtctgcatctgtaggagaccgtgtcaccatcacttgccgggcaagtatgccgattgtgcggaacttaaggtggtatcagcagaaaccagggaaagcccctaagctcctgatctattcttcgtcctatttggagcccggggtcccatcacgtttcagtggtagtggatccgggacagatttcactctcaccatcagcagtctgcaacccgaagattttgctacgtaccactgtcaacaggggtatcgttggcctgttacgttcggccaagggaccaaggtggaaatcaaacgg

SEQ ID NO: 272 - DNA, 324 bp, Artificial Sequence; identical to SEQ ID NO: 244
  Chemically synthesized ABT1-95-48

SEQ ID NO: 273 - DNA, 324 bp, Artificial Sequence
  Chemically synthesized ABT1-95-49
gacatccagatgacccagtctccatcctccctatctgcatctgtaggagaccgtgtcaccatcacttgccgggcaagtcagccgattgtgcggaacttaaggtggtatcagcagaaaccagggaaagcccctaagctcctgatctattcttcgtcctatttggagcccggggtcccatcacgtttcagtggtagtggatccgggacagatttcactctcaccatcagcagtctgcaacccgaagattttgctacgtaccactgtcaacaggggtatcgttggcctgttacgttcggccaagggaccaaggtggaaatcaaacgg

SEQ ID NO: 274 - DNA, 324 bp, Artificial Sequence
  Chemically synthesized ABT1-95-50
gacatccagatgacccagtctccatcctccctgtctgcatctgtaggagaccgtgtcaccatcacttgccgggcaagtcagccgattccgcggaacttaaggtggtatcagcagaaaccagggaaagcccctaagctcctgatctattcttcgtcctatttggagcccggggtcccatcacgtttcagtggtagtggatccgggacagatttcactctcaccatcagcagtctgcaacccgaagattttgctacgtaccactgtcaacaggggtatcgttggcctgttacgttcggccaagggaccaaggtggaaatcaaacgg

SEQ ID NO: 275 - DNA, 324 bp, Artificial Sequence
  Chemically synthesized ABT1-95-51
gacatccagatgacccagtctccatcctccctgtctgcatctgtaggagaccgtgtcaccatcacttgccgggcaagtcagccgattatccggaacttaaggtggtatcagcagaaaccagggaaagcccctaagctcctgatctattcttcgtcctatttggagcccggggtcccatcacgtttcagtggtagtggatccgggacagatttcactctcaccatcagcagtctgcaacccgaagattttgctacgtaccactgtcaacaggggtatcgttggcctgttacgttcggccaagggaccaaggtggaaatcaaacgg

SEQ ID NO: 276 - DNA, 324 bp, Artificial Sequence
  Chemically synthesized ABT1-95-52
gacatccagatgacccagtctccatcctccctgtctgcatctgtaggagaccgtgtcaccatcacttgccgggcaagtcagccgattgtgtcgaacttaaggtggtatcagcagaaaccagggaaagcccctaagctcctgatctattcttcgtcctatttggagcccggggtcccatcacgtttcagtggtagtggatccgggacagatttcactctcaccatcagcagtctgcaacccgaagattttgctacgtaccactgtcaacaggggtatcgttggcctgttacgttcggccaagggaccaaggtggaaatcaaacgg

SEQ ID NO: 277 - DNA, 324 bp, Artificial Sequence
  Chemically synthesized ABT1-95-53
gacatccagatgacccagtctccatcctccctgtctgcatctgtaggagaccgtgtcaccatcacttgccgggcaagtcagccgattgtggccaacttaaggtggtatcagcagaaaccagggaaagcccctaagctcctgatctattcttcgtcctatttggagcccggggtcccatcacgtttcagtggtagtggatccgggacagatttcactctcaccatcagcagtctgcaacccgaagattttgctacgtaccactgtcaacaggggtatcgttggcctgttacgttcggccaagggaccaaggtggaaatcaaacgg

SEQ ID NO: 278 - DNA, 324 bp, Artificial Sequence
  Chemically synthesized ABT1-95-54
gacatccagatgacccagtctccatcctccctgtctgcatctgtaggagaccgtgtcaccatcacttgccgggcaagtcagccgattgtgaccaacttaaggtggtatcagcagaaaccagggaaagcccctaagctcctgatctattcttcgtcctatttggagcccggggtcccatcacgtttcagtggtagtggatccgggacagatttcactctcaccatcagcagtctgcaacccgaagattttgctacgtaccactgtcaacaggggtatcgttggcctgttacgttcggccaagggaccaaggtggaaatcaaacgg

SEQ ID NO: 279 - DNA, 324 bp, Artificial Sequence
  Chemically synthesized ABT1-95-55
gacatccagatgacccagtctccatcctccctgtctgcatctgtaggagaccgtgtcaccatcacttgccgggcaagtcagccgattgtgcacaacttaaggtggtatcagcagaaaccagggaaagcccctaagctcctgatctattcttcgtcctatttggagcccggggtcccatcacgtttcagtggtagtggatccgggacagatttcactctcaccatcagcagtctgcaacccgaagattttgctacgtaccactgtcaacaggggtatcgttggcctgttacgttcggccaagggaccaaggtggaaatcaaacgg

SEQ ID NO: 280 - DNA, 324 bp, Artificial Sequence
  Chemically synthesized ABT1-95-56
gacatccagatgacccagtctccatcctccctgtctgcatctgtaggagaccgtgtcaccatcacttgccgggcaagtcagccgattgtgcgcaacttaaggtggtatcagcagaaaccagggaaagcccctaagctcctgatctattcttcgtcctatttggagcccggggtcccatcacgtttcagtggtagtggatccgggacagatttcactctcaccatcagcagtctgcaacccgaagattttgctacgtaccactgtcaacaggggtatcgttggcctgttacgttcggccaagggaccaaggtggaaatcaaacgg

SEQ ID NO: 281 - DNA, 324 bp, Artificial Sequence
  Chemically synthesized ABT1-95-57
gacatccagatgacccagtctccatcctccctgtctgcatctgtaggagaccgtgtcaccatcacttgccgggcaagtcagccgattgtggagaacttaaggtggtatcagcagaaaccagggaaagcccctaagctcctgatctattcttcgtcctatttggagcccggggtcccatcacgtttcagtggtagtggatccgggacagatttcactctcaccatcagcagtctgcaacccgaagattttgctacgtaccactgtcaacaggggtatcgttggcctgttacgttcggccaagggaccaaggtggaaatcaaacgg

SEQ ID NO: 282 - DNA, 324 bp, Artificial Sequence
  Chemically synthesized ABT1-95-58
gacatccagatgacccagtctccatcctccctgtctgcatctgtaggagaccgtgtcaccatcacttgccgggcacgtcagccgattgtgtcgaacttaaggtggtatcagcagaaaccagggaaagcccctaagctcctgatctattcttcgtcctatttggagcccggggtcccatcacgtttcagtggtagtggatccgggacagatttcactctcaccatcagcagtctgcaacccgaagattttgctacgtaccactgtcaacaggggtatcgttggcctgttacgttcggccaagggaccaaggtggaaatcaaacgg

SEQ ID NO: 283 - DNA, 324 bp, Artificial Sequence
  Chemically synthesized ABT1-95-59
gacatccagatgacccagtctccatcctccctgtctgcatctgtaggagaccgtgtcaccatcacttgccgggcaagtcagccgattgtgaagaacttaaggtggtatcagcagaaaccagggaaagcccctaagctcctgatctattcttcgtcctatttggagcccggggtcccatcacgtttcagtggtagtggatccgggacagatttcactctcaccatcagcagtctgcaacccgaagattttgctacgtaccactgtcaacaggggtatcgttggcctgttacgttcggccaagggaccaaggtggaaatcaaacgg

SEQ ID NO: 284 - DNA, 324 bp, Artificial Sequence
  Chemically synthesized ABT1-95-60
gacatccagatgacccagtctccagcctccctgtctgcatctgtaggagaccgtgtcaccatcacttgccgggcaagtcagccgattgtggccaacttaaggtggtatcagcagaaaccagggaaagcccctaagctcctgatctattcttcgtcctatttggagcccggggtcccatcacgtttcagtggtagtggatccgggacagatttcactctcaccatcagcagtctgcaacccgaagattttgctacgtaccactgtcaacaggggtatcgttggcctgttacgttcggccaagggaccaaggtggaaatcaaacgg

SEQ ID NO: 285 - DNA, 324 bp, Artificial Sequence
  Chemically synthesized ABT1-95-61
gacatccagatgacccagtctccatcctccctgtctgcatctgtaggagaccgtgtcaccatcacttgccgggcaagtcagccgattgtgcggaacttacgctggtatcagcagaaaccagggaaagcccctaagctcctgatctattcttcgtcctatttggagcccggggtcccatcacgtttcagtggtagtggatccgggacagatttcactctcaccatcagcagtctgcaacccgaagattttgctacgtaccactgtcaacaggggtatcgttggcctgttacgttcggccaagggaccaaggtggaaatcaaacgg

SEQ ID NO: 286 - DNA, 324 bp, Artificial Sequence
  Chemically synthesized ABT1-95-62
gacatccagatgacccagtctccatcctccctgtctgcatctgtaggagaccgtgtcaccatcacttgccgggcaagtcagccgattgtgcggaacttaaggtggtatcagcagaaaccagggaaagcccctaagctcctgatctactcttcgtcctatttggagcccggggtcccatcacgtttcagtggtagtggatccgggacagatttcactctcaccatcagcagtctgcaacccgaagattttgctacgtaccactgtcaacaggggtatcgttggcctgttacgttcggccaagggaccaaggtggaaatcaaacgg

SEQ ID NO: 287 - DNA, 324 bp, Artificial Sequence
  Chemically synthesized ABT1-95-63
gacatccagatgacccagtctccatcctccctgtctgcatctgtaggagaccgtgtcaccatcacttgccgggcaagtcagccgattgtgcggaacttaaggtggtatcagcagaaactagggaaagcccctaagctcctgatcttctcttcgtcctatttggagcccggggtcccatcacgtttcagtggtagtggatccgggacagatttcactctcaccatcagcagtctgcaacccgaagattttgctacgtaccactgtcaacaggggtatcgttggcctgttacgttcggccaagggaccaaggtggaaatcaaacgg

SEQ ID NO: 288 - DNA, 324 bp, Artificial Sequence
  Chemically synthesized ABT1-95-64
gacatccagatgacccagtccccatcctccctgtctgcatctgtaggagaccgtgtcaccatcacttgccgggcaagtcagccgattgtgcggaacttaaggtggtatcagcagaaaccagggaaagcccctaagctcctggtccactcttcgtcctatttggagcccggggtcccatcacgtttcagtggtagtggatccgggacagatttcactctcaccatcagcagtctgcaacccgaagattttgctacgtaccactgtcaacaggggtatcgttggcctgttacgttcggccaagggaccaaggtggaagtcaaacgg

SEQ ID NO: 289 - DNA, 324 bp, Artificial Sequence
  Chemically synthesized ABT1-95-65
gacatccagatgacccagtctccatcctccctgtctgcatctgtaggagaccgtgtcaccatcacttgccgggcaagtcagccgattgtgcggaacttaaggtggtatcagcagaaaccagggaaagcccctaagctcctgatctatggctcgtcctatttggagcccggggtcccatcacgtttcagtggtagtggatccgggacagatttcactctcaccatcagcagtctgcaacccgaagattttgctacgtaccactgtcaacaggggtatcgttggcctgttacgttcggccaagggaccaaggtggaaatcaaacgg

SEQ ID NO: 290 - DNA, 324 bp, Artificial Sequence
  Chemically synthesized ABT1-95-66
gacatccagatgacccagtctccatcctccctgtctgcatctgtaggagaccgtgtcaccatcacttgccgggcaagtcagccgattgtgcggaacttaaggtggtatcagcagaaaccagggaaagcccctaagctcctggtctatttctcgtcctatttggagcccggggtcccatcacgtttcagtggtagtggatccgggacagatttcactctcaccatcagcagtctgcaacccgaagattttgctacgtaccactgtcaacaggggtatcgttggcctgttacgttcggccaagggaccaaggtggaaatcaaacgg

SEQ ID NO: 291 - DNA, 324 bp, Artificial Sequence
  Chemically synthesized ABT1-95-67
gacatccagatgacccagtctccatcctccctgtctgcatctgtaggagaccgtgtcaccatcacttgccgggcaagtcagccgattgtgcggaacttaaggtggtatcagcagaaaccagggaaagcccctaagctcctgatctatgcgtcgtcctatttggagcccggggtcccatcacgtttcagtggtagtggatccgggacagatttcactctcaccatcagcagtctgcaacccgaagattttgctacgtaccactgtcaacaggggtatcgttggcctgttacgttcggccaagggaccaaggtggaaatcaaacgg

SEQ ID NO: 292 - DNA, 324 bp, Artificial Sequence
  Chemically synthesized ABT1-95-68
gacatccagatgacccagtctccatcctccctgtctgcatctgtaggagaccgtgtcaccatcacttgccgggcaagtcagccgattgtgcggaacttaaggtggtatcagcagaaaccagggaaagcccctaagctcctgatctattcgtcgtcctatttggagcccggggtcccatcacgtttcagtggtagtggatccgggacagatttcactctcaccatcagcagtctgcaacccgaagattttgctacgtaccactgtcaacaggggtatcgttggcctgttacgttcggccaagggaccaaggtggaaatcaaacgg

SEQ ID NO: 293 - DNA, 324 bp, Artificial Sequence
  Chemically synthesized ABT1-95-69
gacatccagatgacccagtctccatcctccctgtctgcatctgtaggagaccgtgtcaccatcacttgccgggcaagtcagccgattgtgcggaacttaaggtggtatcagcagaaaccagggaaagcccctaagctcctgatctataagtcgtcctatttggagcccggggtcccatcacgtttcagtggtagtggatccgggacagatttcactctcaccatcagcagtctgcaacccgaagattttgctacgtaccactgtcaacaggggtatcgttggcctgttacgttcggccaagggaccaaggtggaaatcaaacgg

SEQ ID NO: 294 - DNA, 324 bp, Artificial Sequence
  Chemically synthesized ABT1-95-70
gacatccagatgacccagtctccatcctccctgtctgcatctgtaggagaccgtgtcaccatcacttgccgggcaagtcagccgattgtgcggaacttaaggtggtatcagcagaaaccagggaaagcccctaagctcctggtctatggctcgtcctatttggagcccggggtcccatcacgtttcagtggtagtggatctgggacagatttcactctcaccatcagcagtctgcaacccgaagattttgctacgtaccactgtcaacaggggtatcgttggcctgttacgttcggccaagggaccaaggtggaaatcaaacgg

SEQ ID NO: 295 - DNA, 324 bp, Artificial Sequence
  Chemically synthesized ABT1-95-71
gacatccagatgacccagtctccatcctccctgtctgcatctgtaggagaccgtgtcaccatcacttgccgggcaagtcagccgattgtgcggaacttaaggtggtatcagcagaaaccagggaaagcccctaagctcctgatctataactcgtcctatttggagcccggggtcccatcacgtttcagtggtagtggatccgggacagatttcactctcaccatcagcagtctgcaacccgaagattttgctacgtaccactgtcaacaggggtatcgttggcctgttacgttcggccaagggaccaaggtggaaatcaaacgg

SEQ ID NO: 296 - DNA, 324 bp, Artificial Sequence
  Chemically synthesized ABT1-95-72
gacatccagatgacccagtctccatcctccctgtctgcatctgtaggagaccgtgtcaccatcacttgccgggcaagtcagccgattgtgcggaacttaaggtggtatcagcagaaaccagggaaagcccctaagctcctgatctatcactcgtcctatttggagcccggggtcccatcacgtttcagtggtagtggatccgggacagatttcactctcaccatcagcagtctgcaacccgaagattttgctacgtaccactgtcaacaggggtatcgttggcctgttacgttcggccaagggaccaaggtggaaatcaaacgg

SEQ ID NO: 297 - DNA, 324 bp, Artificial Sequence
  Chemically synthesized ABT1-95-73
gacatccagatgacccagtctccatcctccctgtctgcatctgtaggagaccgtgtcaccatcacttgccgggcaagtcagccgattgtgcggaacttaaggtggtatcagcagaaaccagggaaagcccctaagctcctgatctatcagtcgtcctatttggagcccggggtcccatcacgtttcagtggtagtggatccgggacagatttcactctcaccatcagcagtctgcaacccgaagattttgctacgtaccactgtcaacaggggtatcgttggcctgttacgttcggccaagggaccaaggtggaaatcaaacgg

SEQ ID NO: 298 - DNA, 324 bp, Artificial Sequence
  Chemically synthesized ABT1-95-74
gacatccagatgacccagtctccatcctccctgtctgcatctgtaggagaccgtgtcaccatcacttgccgggcaagtcagccgattgtgcggaacttaaggtggtatcagcagagaccagggaaagcccctaagctcctgatctattctgggtcctatttggagcccggggtcccatcacgtttcagtggtagtggatccgggacagatttcactctcaccatcagcagtctgcaacccgaagattttgctacgtaccactgtcaacaggggtatcgttggcctgttacgttcggccaagggaccaaggtggaaatcaaacgg

SEQ ID NO: 299 - DNA, 324 bp, Artificial Sequence
  Chemically synthesized ABT1-95-75
gacatccagatgacccagtctccatcctccctgtctgcatctgtaggagaccgtgtcaccatcacttgccgggcaagtcagccgattgtgcggaacttaaggtggtatcagcagaaaccagggaaagcccctaagctcctgatctattctgcctcctatttggagcccggggtcccatcacgtttcagtggtagtggatccgggacagatttcactctcaccatcagcagtctgcaacccgaagattttgctacgtaccactgtcaacaggggtatcgttggcctgttacgttcggccaagggaccaaggtggaaatcaaacgg

SEQ ID NO: 300 - DNA, 324 bp, Artificial Sequence
  Chemically synthesized ABT1-95-76
gacatccagatgacccagtctccatcctccctgtctgcatctgtaggagaccgtgtcaccatcacttgccgggcaagtcagccgattgtgcggaacttaaggtggtatcagcagaaaccagggaaagcccctaagctcctgatctattctggctcctatttggagcccggggtcccatcacgtttcagtggtagtggatccgggacagatttcactctcaccatcagcagtctgcaacccgaagattttgctacgtaccactgtcaacaggggtatcgttggcctgttacgttcggccaagggaccaaggtggaaatcaaacgg

SEQ ID NO: 301 - DNA, 324 bp, Artificial Sequence
  Chemically synthesized ABT1-95-77
gacatccagatgacccagtctccatcctccctgtctgcatctgtaggagaccgtgtcaccatcacttgccgggcaagtcagccgattgtgcggaacttaaggtggtatcagcagaaaccagggaaagcccctgagctcctgatctattctggctcctatttggagcccggggtcccatcacgtttcagtggtagtggatccgggacagatttcactctcaccatcagcagtctgcaacccgaagattttgctacgtaccactgtcaacaggggtatcgttggcctgttacgttcggccaagggaccaaggtggaaatcaaacgg

SEQ ID NO: 302 - DNA, 324 bp, Artificial Sequence
  Chemically synthesized ABT1-95-78
gacatccagatgacccagtctccatcctccctgtctgcatctgtaggagaccgtgtcaccatcacttgccgggcaagtcagccgattgtgcggaacttaaggtggtatcagcagaaaccagggaaagcccctaagctcctgatctattctgagtcctatttggagcccggggtcccatcacgtttcagtggtagtggatccgggacagatttcactctcaccatcagcagtctgcaacccgaagattttgctacgtaccactgtcaacaggggtatcgttggcctgttacgttcggccaagggaccaaggtggaaatcaaacgg

SEQ ID NO: 303 - DNA, 324 bp, Artificial Sequence
  Chemically synthesized ABT1-95-79
gacatccagatgacccagtctccatcctccctgtctgcatctgtaggagaccgtgtcaccatcacttgccgggcaagtcagccgattgtgcggaacttaaggtggtatcagcagaaaccagggaaagcccctaagctcctgatctattctagctcctatttggagcccggggtcccatcacgtttcagtggtagtggatccgggacagatttcactctcaccatcagcagtctgcaacccgaagattttgctacgtaccactgtcaacaggggtatcgttggcctgttacgttcggccaagggaccaaggtggaaatcaaacgg

SEQ ID NO: 304 - DNA, 324 bp, Artificial Sequence
  Chemically synthesized ABT1-95-80
gacatccagatgacccagtctccatcctccctgtctgcatctgtaggagaccgtgtcaccatcacttgccgggcaagtcagccgattgtgcggaacttaaggtggtatcagcagaaaccagggaaagcccctaagctcctgatctattctgtgtcctatttggagcccggggtcccatcacgtttcagtggtagtggatccgggacagatttcactctcaccatcagcagtctgcaacccgaagattttgctacgtaccactgtcaacaggggtatcgttggcctgttacgttcggccaagggaccaaggtggaaatcaaacgg

SEQ ID NO: 305 - DNA, 324 bp, Artificial Sequence
  Chemically synthesized ABT1-95-81
gacatccagatgacccagtctccatccttcctgtctgcatctgtaggagaccgtgtcaccatcacttgccgggcaagtcagccgattgtgcggaacttaaggtggtatcagcagaaaccagggaaagcccctaagctcctgatctattctagctcctatttggagcccggggtcccatcacgtttcagtggtagtggatccgggacagatttcactctcaccatcagcagtctgcaacccgaagattttgctacgtaccactgtcaacaggggtatcgttggcctgttacgttcggccaagggaccaaggtggaaatcaaacgg

SEQ ID NO: 306 - DNA, 324 bp, Artificial Sequence
  Chemically synthesized ABT1-95-82
gacatcccgatgacccagtctccatcctccctgtctgcatctgtaggagaccgtgtcactatcacttgccgggcaagtcagccgattgtgcggaacttaaggtggtatcagcagaaaccagggaaagcccctaagctcctgatctattctacctcctatttggagcccggggtcccatcacgtttcagtggtagtggatccgggacagatttcactctcaccatcagcagtctgcaacccgaagattttgctacgtaccactgtcaacaggggtatcgttggcctgttacgttcggccaagggaccaaggtggaaatcaaacgg

SEQ ID NO: 307 - DNA, 324 bp, Artificial Sequence
  Chemically synthesized ABT1-95-83
gacatccagatgacccagtctccatcctccctgtctgcatctgtaggagaccgtgtcaccatcacttgccgggcaagtcagccgattgtgcggaacttaaggtggtatcagcagaaaccagggaaagcccctaagctcctgatctattcttcgtcctatttggagcccggggtcccaccacgtttcagtggtagtggatccgggacagatttcactctcaccatcagcagtctgcaacccgaagattttgctacgtaccactgtcaacaggggtatcgttggcctgttacgttcggccaagggaccaaggtggaaatcaaacgg

SEQ ID NO: 308 - DNA, 324 bp, Artificial Sequence
  Chemically synthesized ABT1-95-84
gacatccagatgacccagtctccatcctccctgtctgcatctgtaggagaccgtgtcaccatcacttgccgggcaagtcagccgattgtgcggaacttaaggtggtatcagcagaaaccagggaaagcccctaagctcctgatctattcttggtcctatttggagcccggggtcccatcacgtttcagtggtagtggatccgggacagatttcactctcaccatcagcagtctgcaacccgaagattttgctacgtaccactgtcaacaggggtatcgttggcctgttacgttcggccaagggaccaaggtggaaatcaaacgg

SEQ ID NO: 309 - DNA, 324 bp, Artificial Sequence
  Chemically synthesized ABT1-95-85
gacatccagatgacccagtctccatcctccctgtctgcatctgtaggagaccgtgtcaccatcacttgccgggcaggtcagccgattgtgcggaacttaaggtggtatcagcagaaaccagggaaagcccctaagctcctgatctattctgggtcctatttggagcccggggtcccatcacgtttcagtggtagtggatccgggacagatttcactctcaccatcagcagtctgcaacccgaagattttgctacgtaccactgtctacaggggtatcgttggcctgttacgttcggccaagggaccaaggtggaaatcaaacgg

SEQ ID NO: 310 - DNA, 324 bp, Artificial Sequence
  Chemically synthesized ABT1-95-86
gacatccagatgacccagtctccatcctccctgtctgcatctgtaggagaccgtgtcaccatcacttgccgggcaagtcagccgattgtgcggaacttaaggtggtatcagcagaaaccagggaaagcccctaagctcctgatctattctacgtcctatttggagcccggggtcccatcacgtttcagtggtagtggatccgggacagatttcactctcaccatcagcagtctgcaacccgaagattttgctacgtaccactgtcaacaggggtatcgttggcctgttacgttcggccaagggaccaaggtggaaatcaaacgg

SEQ ID NO: 311 - DNA, 324 bp, Artificial Sequence
  Chemically synthesized ABT1-95-87
gacatccagatgacccagtctccatcctccctgtctgcatctgtaggagaccgtgtcaccatcacttgccgggcaagtcagccgattgtgcggaacttaaggtggtatcagcagaaaccagggaaagcccctaagctcctgatctattcttcgtcccggttggagcccggggtcccatcacgtttcagtggtagtggatccgggacagatttcactctcaccatcagcagtctgcaacccgaagattttgctacgtaccactgtcaacaggggtatcgttggcctgttacgttcggccaagggaccaaggtggaaatcaaacgg

SEQ ID NO: 312 - DNA, 324 bp, Artificial Sequence
  Chemically synthesized ABT1-95-88
gacatccagatgacccagtctccatcctccctgtctgcatctgtaggagaccgtgtcaccatcacttgccgggcaagtcagccgattgtgcggaacttaaggtggtatcagcagaaaccagggaaagcccctaagctcctgatctattcttcgtcctacttggagcccggggtcccatcacgtttcagtggtagtggatccgggacagatttcactctcaccatcagcagtctgcaacccgaagattttgctacgtaccactgtcaacaggggtatcgttggcctgttacgttcggccaagggaccaaggtggaaatcaaacgg

SEQ ID NO: 313 - DNA, 324 bp, Artificial Sequence
  Chemically synthesized ABT1-95-89
gacatccagatgacccagtctccatcctccctgtctgcatctgtaggagaccgtgtcaccatcacttgccgggcaagtcagccgattgtgcggaacttaaggtggtatcagcagaaaccagggaaagcccctaagctcctgatctattcttcgtccctcttggagcccggggtcccatcacgtttcagtggtagtggatccgggacagatttcactctcaccatcagcagtctgcaacccgaagattttgctacgtaccactgtcaacaggggtatcgttggcctgttacgttcggccaagggaccaaggtggaaatcaaacgg

SEQ ID NO: 314 - DNA, 324 bp, Artificial Sequence
  Chemically synthesized ABT1-95-90
gacatccagatgacccagtctccatcctccctgtctgcatctgtaggagaccgtgtcaccatcacttgccgggcaagtcagccgattgtgcggaacttaaggtggtatcagcagaaaccagggaaagcccctaagctcctgatctattcttcgtcccagttggagcccggggtcccatcacgtttcagtggtagtggatccgggacagatttcactctcaccatcagcagtctgcaacccgaagattttgctacgtaccactgtcaacaggggtatcgttggcctgttacgttcggccaagggaccaaggtggaaatcaaacgg

SEQ ID NO: 315 - DNA, 324 bp, Artificial Sequence
  Chemically synthesized ABT1-95-91
gacatccagatgacccagtctccatcctccctgtctgcatctgtaggagaccgtgtcaccatcacttgccgggcgagtcagccgattgtgcggaacttaaggtggtatcagcagaaaccagggaaagcccctaagctcctgatctattcttcgtccaatttggagcccggggtcccatcacgtttcagtggtagtggatccgggacagatttcactctcaccatcagcagtctgcaacccgaagattttgctacgtaccactgtcaacaggggtatcgttggcctgttacgttcggccaagggaccaaggtggaaatcaaacgg

SEQ ID NO: 316 - DNA, 324 bp, Artificial Sequence
  Chemically synthesized ABT1-95-92
gacatccagatgacccagtctccatcctccctgtctgcatctgtaggagaccgtgtcaccatcacttgccgggcaagtcagccgattgtgcggaacttaaggtggtatcagcagaaaccagggaaagcccctaagctcctgatctattcttcgtccaccttggagcccggggtcccatcacgtttcagtggtagtggatccgggacagatttcactctcaccatcagcagtctgcaacccgaagattttgctacgtaccactgtcaacaggggtatcgttggcctgttacgttcggccaagggaccaaggtggaaatcaaacgg

SEQ ID NO: 317 - DNA, 324 bp, Artificial Sequence
  Chemically synthesized ABT1-95-93
gacatccagatgacccagtctccatcctccctgtctgcatctgtaggagaccgtgtcaccatcacttgccgggcaagtcagccgattgtgcggaacttaaggtggtatcagcagaaaccagggaaagcccctaagctcctgatctattcttcgtccatcttggagcccggggtcccatcacgtttcagtggtggtggatccgggacagatttcactctcaccatcagcagtctgcaacccgaagattttgctacgtaccactgtcaacaggggtatcgttggcctgttacgttcggccaagggaccaaggtggaaatcaaacgg

SEQ ID NO: 318 - DNA, 324 bp, Artificial Sequence
  Chemically synthesized ABT1-95-94
gacatccagatgacccagtctccatcctccctgtctgcatctgtaggagaccgtgtcaccatcacttgccgggcaagtcagccgattgtgcggaacttaaggtggtatcagcagaaaccagggaaagcccctaagctcctgatctattcttcgtcctccttggagcccggggtcccatcacgtttcagtggtagtggatccgggacagatttcactctcaccatcagcagtctgcaacccgaagattttgctacgtaccactgtcaacaggggtatcgttggcctgttacgttcggccaagggaccaaggtggaaatcaaacgg

SEQ ID NO: 319 - DNA, 324 bp, Artificial Sequence
  Chemically synthesized ABT1-95-95
gacatccagatgatccagtctccatcctccctgtctgcatctgtaggagaccgtgtcaccatcacttgccgggcaagtcagccgattgtgcggaacttaaggtggtatcagcagaaaccagggaaagcccctaagctcctgatctattcttcgtcccagttggagcccggggtcccatcacgtttcagtggtagtggatccgggacagatttcactctcaccatcagcagtctgcaacccgaagattttgctacgtaccactgtcaacaggggtatcgttggcctgttacgttcggccaagggaccaaggtggaaatcaaacgg

SEQ ID NO: 320 - DNA, 324 bp, Artificial Sequence
  Chemically synthesized ABT1-95-96
gacatccagatgacccagtctccatcctccctgtctgcatctgtaggagaccgtgtcaccatcgcttgccgggcaagtcagccgattgtgcggaacttaaggtggtatcagcagaaaccagggaaagcccctaagctcctgatctattcttcgtccaggttggagcccggggtcccatcacgtttcagtggtagtggatccgggacagatttcactctcaccatcagcagtctgcaacccgaagattttgctacgtaccactgtcaacaggggtatcgttggcctgttacgttcggccaagggaccaaggtggaaatcaaacgg

SEQ ID NO: 321 - DNA, 324 bp, Artificial Sequence
  Chemically synthesized ABT1-95-97
gacatccagatgacccagtctccatcctccctgtctgcatctgtaggagaccgtgtcaccatcacttgccgggcaagtcagccgattgtgcggaacttaaggtggtatcagcagaaaccagggaaagcccctaagctcctgatctattcttcgtccttcttggagcccggggtcccatcacgtttcagtggtagtggatccgggacagatttcactctcaccatcagcagtctgcaacccgaagattttgctacgtaccactgtcaacaggggtatcgttggcctgttacgttcggccaagggaccaaggtggaaatcaaacgg

SEQ ID NO: 322 - DNA, 324 bp, Artificial Sequence
  Chemically synthesized ABT1-95-98
gacatccagatgacccagtctccatcctccctgtctgcatctgtaggagaccgtgtcaccatcacttgccgggcaagtcagccgattgtgcggaacttaaggtggtatcagcagaaaccagggaaagcccctaagctcctgatctattcttcgtccgcgttggagcccggggtcccatcacgtttcagtggtagtggatccgggacagatttcactctcaccatcagcagtctgcaacccgaagattttgctacgtaccactgtcaacaggggtatcgttggcctgttacgttcggccaagggaccaaggtggaaatcaaacgg

SEQ ID NO: 323 - DNA, 324 bp, Artificial Sequence
  Chemically synthesized ABT1-95-99
gacatccagatgacccagtctccatcctccctgtctgcatctgtaggagaccgtgtctccatcacttgccgggcaagtcagccgattgtgcggaacttaaggtggtatcagcagaaaccagggaaagcccctaagctcctgatctattcttcgtccacgttggagcccggggtcccatcacgtttcagtggtagtggatccgggacagatttcactctcaccatcagcagtctgcaacccgaagattttgctacgtaccactgtcaacaggggtatcgttggcctgttacgttcggccaagggaccaaggtggaaatcaaacgg

SEQ ID NO: 324 - DNA, 324 bp, Artificial Sequence
  Chemically synthesized ABT1-95-100
gacatccagatgacccagtctccatcctccctgtctgcatctgtaggagaccgtgtcaccatcacttgccgggcaagtcggccgattgtgcggaacttaaggtggtatcagcagaaaccagggaaagcccctaagctcctgatctattcttcgtccctcttggagcccggggtcccatcacgtttcagtggtagtggatccgggacagatttcactctcaccatcagcagtctgcaacccgaagattttgctacgtaccactgtcaacaggggtatcgttggcctgttacgttcggccaagggaccaaggtggaaatcaaacgg

SEQ ID NO: 325 - DNA, 324 bp, Artificial Sequence
  Chemically synthesized ABT1-95-101
gacatccagatgacccagtctccatcctccctgtctgcatccgtaggagaccgtgtcaccatcacttgccgggcgagtcagccgattgtgcggaacttaaggtggtatcagcagaaaccagggaaagcccctaagctcctggtctattcttcgtccctcttggagcccggggtcccatcacgtttcagtggtagtggatccgggacagatttcactctcaccatcagcagtctgcaacccgaagattttgctacgtaccactgtcaacaggggtatcgttggcctgttacgttcggccaagggaccaaggtggaaatcaaacgg

SEQ ID NO: 326 - DNA, 324 bp, Artificial Sequence
  Chemically synthesized ABT1-95-102
gacatccagatgacccagtctccatcctccctgtctgcatctgtaggagaccgtgtcaccatcacttgccgggcaagtcagccgattgtgcggaacttaaggtggtatcagcagaaaccagggaaagcccctaagctcctgatctattcttcgtcctatttgcagcccggggtcccatcacgtttcagtggtagtggatccgggacagatttcactctcaccatcagcagtctgcaacccgaagattttgctacgtaccactgtcaacaggggtatcgttggcctgttacgttcggccaagggaccaaggtggaaatcaaacgg

SEQ ID NO: 327 - DNA, 324 bp, Artificial Sequence
  Chemically synthesized ABT1-95-103
gacatccagatgacccagtctccatcctccctgtctgcatctgtaggagaccgtgtcaccatcacttgccgggcaagtcagccgattgtgcggaacttaaggtggtatcagcagaaaccagggaaagcccctaagctcctgatctattcttcgtcctatttggagaagggggtcccatcacgtttcagtggtagtggatccgggacagatttcactctcaccatcagcagtctgcaacccgaagattttgctacgtaccactgtcaacaggggtatcgttggcctgttacgttcggccaagggaccaaggtggaaatcaaacgg

SEQ ID NO: 328 - DNA, 324 bp, Artificial Sequence
  Chemically synthesized ABT1-95-104
gacatccagatgacccagtctccatcctccctgtctgcatctgtaggagaccgtgtcaccatcacttgccgggcaagtcagccgattgtgcggaacttaaggtggtatcagcagaaaccagggaaagcccctaagctcctgatctattcttcgtcctatttggagtccggggtcccatcacgtttcagtggtagtggatccgggacagatttcactctcaccatcagcagtctgcaacccgaagattttgctacgtaccactgtcaacaggggtatcgttggcctgttacgttcggccaagggaccaaggtggaaatcaaacgg

SEQ ID NO: 329 - DNA, 324 bp, Artificial Sequence
  Chemically synthesized ABT1-95-105
gacatccagatgacccagtctccatcctccctgtctgcatctgtaggagaccgtgtcaccatcacttgccgggcaagtcagccgattgtgcggaacttaaggtggtatcagcagaaaccagggaaagcccctaagctcctgatctattcttcgtcctatttggagcgcggggtcccatcacgtttcagtggtagtggatccgggacagatttcactctcaccatcagcagtctgcaacccgaagattttgctacgtaccactgtcaacaggggtatcgttggcctgttacgttcggccaagggaccaaggtggaaatcaaacgg

SEQ ID NO: 330 - DNA, 324 bp, Artificial Sequence
  Chemically synthesized ABT1-95-106
gacatccagatgacccagtctccatcctccctgtctgcatctgtaggagaccgtgtcaccatcacttgccgggcaagtcagccgattgtgcggaacttaaggtggtatcagcagaaaccagggaaagcccctaagctcctgatctattcttcgtcctatttggagaggggggtcccatcacgtttcagtggtagtggatccgggacagatttcactctcaccatcagcagtctgcaacccgaagattttgctacgtaccactgtcaacaggggtatcgttggcctgttgcgttcggccaagggaccaaggtggaaatcaaacgg

SEQ ID NO: 331 - DNA, 324 bp, Artificial Sequence
  Chemically synthesized ABT1-95-107
gacatccagatgacccagtctccatcctccctgtctgcatctgtaggagaccgtgtcaccatcacttgccgggcaagtcagccgattgtgcggaacttaaggtggtatcagcagaaaccagggaaagcccctaagctcctgatctattcttcgtcctatttggagcacggggtcccatcacgtttcagtggtagtggatccgggacagatttcactctcaccatcagcagtctgcaacccgaagattttgctacgtaccactgtcaacaggggtatcgttggcctgttacgttcggccaagggaccaaggtggaaatcaaacgg

SEQ ID NO: 332 - DNA, 324 bp, Artificial Sequence
  Chemically synthesized ABT1-95-108
gacatccagatgacccagtctccatcctccctgtctgcatctgtaggagaccgtgtcaccatcacttgccgggcaagtcagccgattgtgcggaacttaaggtggtatcagcagaaaccagggaaagcccctaagctcctgatctattcttcgtcctatttggaggagggggtcccatcacgtttcagtggtagtggatccgggacagatttcactctcaccatcagcagtctgcaacccgaagattttgctacgtaccactgtcaacaggggtatcgttggcctgttacgttcggccaagggaccaaggtggaaatcaaacgg

SEQ ID NO: 333 - DNA, 324 bp, Artificial Sequence
  Chemically synthesized ABT1-95-109
gacatccagatgacccagtctccatcctccctgtctgcatctgtaggagaccgtgtcaccatcacttgccgggcaaatcagccgattgtgcggaacttaaggtggtatcagcagaaaccagggaaagcccctaagctcctgatctattcttcgtcctatttggagaacggggtcccatcacgtttcagtggtagtggatccgggacagatttcactctcaccatcagcagtctgcaacccgaagattttgctacgtaccactgtcaacaggggtatcgttggcctgttacgttcggccaagggaccaaggtggaaatcaaacgg

SEQ ID NO: 334 - DNA, 324 bp, Artificial Sequence
  Chemically synthesized ABT1-95-110
gacatccagatgacccagtcaccatcctccctgtctgcatctgtaggagaccgtgtcaccatcacttgccgggcaagtcagccgattgtgcggaacttaaggtggtatcagcagaaaccagggaaagcccctaagctcctgatctattcttcgtcctatttggaggcgggggtcccatcacgtttcagtggtagtggatccgggacagatttcactctcaccatcagcagtctgcaacccgaagattttgctacgtaccactgtcaacaggggtatcgttggcctgttacgttcggccaagggaccaaggtggaaatcaaacgg

SEQ ID NO: 335 - DNA, 324 bp, Artificial Sequence
  Chemically synthesized ABT1-95-111
gacatccagatgacccagtctccatcctccctgtctgcatctgtaggagaccgtgtcaccatcacttgccgggcaagtcagccgattgtgcggaacttaaggtggtatcagcagaaaccagggaaagcccctaagctcctgatctattcttcgtcctatttggaggacggggtcccatcacgtttcagtggtagtggatccgggacagatttcactctcaccatcagcagtctgcaacccgaagattttgctacgtaccactgtcaacaggggtatcgttggcctgttacgttcggccaagggaccaaggtggaaatcaaacgg

SEQ ID NO: 336 - DNA, 324 bp, Artificial Sequence
  Chemically synthesized ABT1-95-112
gacatccagatgacccagtctccatcctccctgtctgcatctgtaggagaccgtgtcaccatcacttgccgggcaagtcagccgattgtgcggaacttaaggtggtatcagcagaaaccagggaaagcccctaagctcctgatctattcttcgtcctatttggagaacggggtcccatcacgtttcagtggtagtggatccgggacagatttcactctcaccatcagcagtctgcaacccgaagattttgctacgtaccactgtcaacaggggtatcgttggcctgttacgttcggccaagggaccaaggtggaaatcaaacgg

SEQ ID NO: 337 - DNA, 324 bp, Artificial Sequence; identical to SEQ ID NO: 244
  Chemically synthesized ABT1-95-113

SEQ ID NO: 338 - DNA, 324 bp, Artificial Sequence
  Chemically synthesized ABT1-95-114
gacatccagatgacccagtctccatcctccctgtctgcatctgtaggagaccgtgtcaccatcacttgccgggcaagtcagccgattgtgcggaacttaaggtggtatcagcagaaaccagggaaagcccctaagctcctgatctattcttcgtcctatttggaggtgggggtcccatcacgtttcagtggtagtggatccgggacagatttcactctcaccatcagcagtctgcaacccgaagattttgctacgtaccactgtcaacaggggtatcgttggcctgttacgttcggccaagggaccaaggtggaaatcaaacgg

SEQ ID NO: 339 - DNA, 324 bp, Artificial Sequence
  Chemically synthesized ABT1-95-115
gacatccagatgacccagtctccatcctccctgtctgcatctgtaggagaccgtgtcaccatcacttgccgggcaagtcagccgattgtgcggaacttaaggtggtatcagcagaaaccagggaaagcccctaagctcctgatctattcttcgtcctatttggagcccggggtcccatcacgtttcagtggtagtggatccgggacagatttcactctcaccatcagcagtctgcaacccgaagattttgctacgtaccactgtttgcaggggtatcgttggcctgttacgttcggccaagggaccaaggtggaaatcaaacgg

SEQ ID NO: 340 - DNA, 324 bp, Artificial Sequence
  Chemically synthesized ABT1-95-116
gacatccagatgacccagtctccatcctccctgtctgcatctgtaggagaccgtgtcaccatcacttgccgggcaagtcagccgattgtgcggaacttaaggtggtatcagcagaaaccagggaaagcccctaagctcctgatctattcttcgtcctatttggagcccggggtcccatcacgtttcagtggtagtggatccgggacagatttcactctcaccatcagcagtctgcaacccgaagattttgctacgtaccactgtgtgcaggggtatcgttggcctgttacgttcggccaagggaccaaggtggaaatcaaacgg

SEQ ID NO: 341 - DNA, 324 bp, Artificial Sequence
  Chemically synthesized ABT1-95-117
gacatccagatgacccagtctccatcctccctgtctgcatctgtaggagaccgtgtcaccatcacttgccgggcaagtcagccgattgtgcggaacttaaggtggtatcagcagaaaccagggaaagcccctaagctcctgatctattcttcgtcctatttggagcccggggtcccatcacgtttcagtggtagtggatccgggacagatttcactctcaccatcagcagtctgcaacccgaagattttgctatgtaccactgtgtccaggggtatcgttggcctgttacgttcggccaagggaccaaggtggaaatcaaacgg

SEQ ID NO: 342 - DNA, 324 bp, Artificial Sequence
  Chemically synthesized ABT1-95-118
gacatccagatgacccagtctccatcctccctgtctgcatctgtaggagaccgtgtcaccatcacttgccgggcaagtcagccgattgtgcggaacttaaggtggtatcagcagaaaccagggaaagcccctaagctcctgatctattcttcgtcctatttggagcccggggtcccatcacgtttcagtggtagtggatccgggacagatttcactctcaccatcagcagtctgcaacccgaagattttgctacgtaccactgttcgcaggggtatcgttggcctgttacgttcggccaagggaccaaggtggaaatcaaacgg

SEQ ID NO: 343 - DNA, 324 bp, Artificial Sequence
  Chemically synthesized ABT1-95-119
gacatccagatgacccagtctccatcctccctgtctgcatctgtaggagaccgtgtcaccatcacttgccgggcaagtcagccgattgtgcggaacttaaggtggtatcagcagaaaccagggaaagcccctaagctcctgatctattcttcgtcctatttggagcccggggtcccatcacgtttcagtggtagtggatccgggacagatttcactctcaccatcagcagtctgcaacccgaagattttgctacgtaccactgtgagcaggggtatcgttggcctgttacgttcggccaagggaccaaggtggaaatcaaacgg

SEQ ID NO: 344 - DNA, 324 bp, Artificial Sequence
  Chemically synthesized ABT1-95-120
gacatccagatgacccagtctccatcctccctgtctgcatctgtaggagaccgtgtcaccatcacttgccgggcaagtcagccgattgcgcggaacttaaggtggtatcagcagaaaccagggaaagcccctaagctcctgatctattcttcgtcctatttggagcccggggtcccatcacgtttcagtggtagtggatccgggacagatttcactctcaccatcagcagtctgcaacccgaagattttgctacgtaccactgtcaacaggtgtatcgttggcctgttacgttcggccaagggaccaaggtggaaatcaaacgg

SEQ ID NO: 345 - DNA, 324 bp, Artificial Sequence
  Chemically synthesized ABT1-95-121
gacatccagatgacccagtctccatcctccctgtctgcatctgtaggagaccgtgtcaccatcacttgccgggcaagtcagccgattgtgcggaacttaaggtggtatcagcagaaaccagggaaagcccctaagctcctgatctattcttcgtcctatttggagcccggggtcccatcacgtttcagtggtagtggatccgggacagatttcactctcaccatcagcagtctgcaacccgaagattttgctacgtaccactgtcaacaggggtatgagtggcctgttacgttcggccaagggaccaaggtggaaatcaaacgg

SEQ ID NO: 346 - DNA, 324 bp, Artificial Sequence
  Chemically synthesized ABT1-95-122
gacatccagatgacccagtctccatcctccctgtctgcatctgtaggagaccgtgtcaccatcacttgccgggcaagtcagccgattgtgcggaacttaaggtggtatcagcagaaaccagggaaagcccctaagctcctgatctattcttcgtcctatttggagcccggggtcccatcacgtttcagtggtagtggatccgggacagatttcattctcaccatcagcagtctgcaacccgaagattttgctacgtaccactgtcaacaggggtatcgttggcctgttacgttcggccaagggaccaaggtggaaatcaaacgg

SEQ ID NO: 347 - DNA, 324 bp, Artificial Sequence
  Chemically synthesized ABT1-95-123
gacatccagatgacccagtctccatcctccctgtctgcatctgtaggagaccgtgtcaccatcacttgccgggcaagtcagccgattgtgcggaacttaaggtggtatcagcagaaaccagggaaagcccctaagctcctgatctattcttcgtcctatttggagcccggggtcccatcacgtttcagtggtagtggatccgggacagatttcactctcaccatcagcagtctgcaacccgaagattttgctacgtaccactgtcaacaggggtatgcgtggcctgttacgttcggccaagggaccaaggtggaaatcaaacgg

SEQ ID NO: 348 - DNA, 324 bp, Artificial Sequence
  Chemically synthesized ABT1-95-124
gacatccagatgacccagtctccatcctccctgtctgcatctgtaggagaccgtgtcaccatcacttgccgggcaagtcagccgattgtgcggaacttaaggtggtatcagcagaaaccagggaaagcccctaagctcctgatctattcttcgtcctatttggagcccggggtcccatcacgtttcagtggtagtggatccgggacagatttcactctcaccatcagcagtctgcaacccgaagattttgctacgtaccactgtcaacaggggtatatgtggcctgttacgttcggccaagggaccaaggtggaaatcaaacgg

SEQ ID NO: 349 - DNA, 324 bp, Artificial Sequence
  Chemically synthesized ABT1-95-125
gacatccagatgacccagtctccatcctccctgtctgcatctgtaggagaccgtgtcaccatcacttgccgggcaagtcagccgattgtgcggaacttaaggtggtatcagcagaaaccagggaaagcccctaagctcctgatctattcttcgtcctatttggagcccggggtcccatcacgtttcagtggtagtggatccgggacagatttcactctcaccatcagcagtctgcaacccgaagattttgctacgtaccactgtcaacaggggtatcgttggcctctgacgttcggccaagggaccaaggtggaaatcaaacgg

SEQ ID NO: 350 - DNA, 324 bp, Artificial Sequence
  Chemically synthesized ABT1-95-126
gacatccagatgacccagtctccatcctccctgtctgcatctgtaggagaccgtgtcaccatcacttgccgggcaagtcagccgattgtgcggaacttaaggtggtatcagcagaaaccagggaaagcccctaagctcctgatctattcttcgtcctatttggagcccggggtcccatcacgtttcagtggtagtggatccgggacagatttcactctcaccatcagcagtctgcaacccgaagattttgctacgtaccactgtcaacaggggtatcgttggccttcgacgttcggccaagggaccaaggtggaaatcaaacgg

SEQ ID NO: 351 - DNA, 324 bp, Artificial Sequence
  Chemically synthesized ABT1-95-127
gacatccagatgacccagtctccatcctccctgtctgcatctgtaggagaccgtgtcaccatcacttgccgggcaagtcagccgattgtgcggaacttaaggtggtatcagcagaaaccagggaaagcccctaagctcctgatctattcttcgtcctatttggagcccggggtcccatcacgtttcagtggtagtggatccgggacagatttcactctcaccatcggcagtctgcaacccgaagattttgctacgtaccactgtcaacaggggtatcgttggcctattacgttcggccaagggaccaaggtggaaatcaaacgg

SEQ ID NO: 352 - DNA, 324 bp, Artificial Sequence
  Chemically synthesized ABT1-95-128
gacatccagatgacccagtctccatcctccctgtctgcatctgtaggagaccgtgtcaccatcacttgccgggcaagtcagccgattgtgcggaacttaaggtggtatcagcagaaaccagggaaagcccctaagctcctgatctattcttcgtcctatttggagcccggggtcccatcacgtttcagtggtagtggatccgggacagatttcactctcaccatcagcagtctgcaacccgaagattttgctacgtaccactgtcaacaggggtatcgttggcctggcacgttcggccaagggaccaaggtggaaatcaagcgg

SEQ ID NO: 353 - DNA, 324 bp, Artificial Sequence
  Chemically synthesized ABT1-95-129
gacatccagatgacccagtctccatcctccctgtctgcatctgtaggagaccgtgtcaccatcacttgccgggcaagtcagccgattgtgcggaacttaaggtggtatcagcagaaaccagggaaagcccctaagctcctgatctattcttcgtcctatttggagcccggggtcccatcacgtttcagtggtagtggatccgggacagatttcactctcaccatcagcagtctgcaccccgaagatctagctacgtaccactgtcaacaggggtatcgttggcctgttacgttcggccaagggaccaaggtggaaatcaaacgg

SEQ ID NO: 354 - DNA, 324 bp, Artificial Sequence; identical to SEQ ID NO: 255
  Chemically synthesized ABT1-95-130

SEQ ID NO: 355 - DNA, 324 bp, Artificial Sequence
  Chemically synthesized ABT1-95-131
gacatccagatgacccagtctccatcctccctgtctgcatctgtaggagaccgtgtcaccatcacttgccgggcaagtcagccgactgtgcggaacctaaggtggtaccagcagaaaccagggaaagcccctaagctcctgatctattcttcgtcctatttggagcccggggtcccatcacgtttcagtggtagtggatccgggacagatttcactctcaccatcagcagtctgcaacccgaagattttgctacgtaccactgtcaacaggggtatcgttggcctgttacgttcggccaagggaccaaggtggaaatcaaacgg

SEQ ID NO: 356 - DNA, 324 bp, Artificial Sequence
  Chemically synthesized ABT1-95-132
gacatccagatgacccagtctccatcctccctgtctgcatctgtaggagaccgtgtcaccatcacttgccgggcaagtcagccgattgtgcggaacttaaggtggtatcagcagaaaccagggatagcccctaagctcctgatctattcttcgtcctatttggagcccggggtcccatcacgtttcagtggtagtggatccgggacagatttcactctcaccatcagcagtccgcaacccgaagattttgctacgtaccactgtcaacaggggtatcgttggcctgttacgttcggccaagggaccaaggtggaaatcaaacgg

SEQ ID NO: 357 - DNA, 324 bp, Artificial Sequence
  Chemically synthesized ABT1-95-133
gacatccagatgacccagtctccatcctccctgtctgcatctgtaggagaccgtgtcaccatcacttgccgggcaagtcagccgattgtgcggaacttaaggtggtatcagcagaaaccagggaaagcccctaagctcctgatctattcttcgtcctatttggagcccggggtcccatcacgtttcagtggtagtggatccgggacagatttcactctcaccatcagcagtctgcaacccgaagattttgctacgtaccactgtcgccaggggtatcgttggcctgttacgttcggccaagggaccaaggtggaaatcaaacgg

SEQ ID NO: 358 - DNA, 324 bp, Artificial Sequence
  Chemically synthesized ABT1-95-134
gacatccagatgacccagtctccatcctccctgtctgcatctgtaggagaccgtgtcaccatcacttgccgggcaagtcagccgattgtgcggaacttaaggtggtatcagcagaaaccagggaaagcccctaagctcctgatctattcttcgtcctatttggagcccggggtcccatcacgtttcagtggtagtggatccgggacagatttcactctcaccatcagcagtctgcaacccgaagattttgctacgtaccactgtgcccaggggtatcgttggcctgttacgttcggccaagggaccaaggtggaaatcaaacgg

SEQ ID NO: 359 - DNA, 324 bp, Artificial Sequence
  Chemically synthesized ABT1-95-135
gacatccagatgacccagtctccatcctccctgtctgcatctgtaggagaccgtgtcaccatcacttgccgggcaagtcagccgattgtgcggaacttaaggtggtatcagcagaaaccagggaaagcccctaagctcctgatctattcttcgtcctatttggagcccggggtcccatcacgtttcagtggtagtggatccgggacagatttcactctcaccatcagcagtctgcaacccgaagattttgctacgtaccactgtcaacaggggtattcctggcctgttacgttcggccaagggaccaaggtggaaatcaaacgg

SEQ ID NO: 360 - DNA, 324 bp, Artificial Sequence
  Chemically synthesized ABT1-95-136
gacatccagatgacccagtctccatcctccctgtctgcatctgtaggagaccgtgtcaccatcacttgccgggcaagtcagccgattgtgcggaacttaaggtggtatcagcagaaaccagggaaagcccctaagctcctgatctattcttcgtcctatttggagcccggggtcccatcacgtttcagtggtagtggatccgggacagatttcactctcaccatcagcagtctgcaccccgaagatctagctacgtaccactgtcaacaggggtatggctggcctgttacgttcggccaagggaccaaggtggaaatcaaacgg

SEQ ID NO: 361 - DNA, 324 bp, Artificial Sequence
  Chemically synthesized ABT1-95-137
gacatccagatgacccagtctccatcctccctgtctgcatctgtaggagaccgtgtcaccatcacttgccgggcaagtcagccgattgtgcggaacttaaggtggtatcagcagaaaccagggaaagcccctaagctcctgatctattcttcgtcctatttggagcccggggtcccatcacgtttcagtggtagtggatccgggacagatttcactctcaccatcagcagtctgcaacccgaagattttgctacgtaccactgtcaacaggggtatctgtggcctgttacgttcggccaagggaccaaggtggaaatcaaacgg

SEQ ID NO: 362 - DNA, 324 bp, Artificial Sequence
  Chemically synthesized ABT1-95-139
gacatccagatgacccagtctccatcctccctgtctgcatctgtaggagaccgtgtcaccatcacttgccgggcaagtcagcagattgtgcggaacttaaggtggtatcagcagaaaccagggaaagcccctaagctcctgatctattcttcgtcctatttggagcccggggtcccatcacgtttcagtggtagtggatccgggacagatttcactctcaccatcagcagtctgcaacccgaagattttgctacgtaccactgtcaacaggggtatcgttggcctgttacgttcggccaagggaccaaggtggaaatcaaacgg

SEQ ID NO: 363 - DNA, 324 bp, Artificial Sequence
  Chemically synthesized ABT1-95-140
gacatccagatgacccagtctccatcctccctgtctgcatctgtaggagaccgtgtcaccatcacttgccgggcaagtcagggcattgtgcggaacttaaggtggtatcagcagaaaccagggaaagcccctaagctcctgatctattcttcgtcctatttggagcccggggtcccatcacgtttcagtggtagtggatccgggacagatttcactctcaccatcagcagtctgcaacccgaagattttgctacgtaccactgtcaacaggggtatcgttggcctgttacgttcggccaagggaccaaggtggaaatcaaacgg

SEQ ID NO: 364 - DNA, 324 bp, Artificial Sequence
  Chemically synthesized ABT1-95-141
gacatccagatgacccagtctccatcctccctgtctgcatctgtaggagaccgtgtcaccatcacttgccgggcaagtcagccgattttgcggaacttaaggtggtatcagcagaaaccagggaaagcccctaagctcctgatctattcttcgtcctatttggagcccggggtcccatcacgtttcagtggtagtggatccgggacagatttcactctcaccatcagcagtctgcaacccgaagattttgctacgtaccactgtcaacaggggtatcgttggcctgttacgttcggccaagggaccaaggtggaaatcaaacgg

SEQ ID NO: 365 - DNA, 324 bp, Artificial Sequence
  Chemically synthesized ABT1-95-142
gacattcagatgacccagtctccatcctccctgtctgcatctgtaggagaccgtgtcaccatcacttgccgggcaagtcagccgattacccggaacttaaggtggtatcagcagaaaccagggaaagcccctaagctcctgatctattcttcgtcctatttggagcccggggtcccatcacgtttcagtggtagtggatccgggacagatttcactctcaccatcagcagtctgcaacccgaagattttgctacgtaccactgtcaacaggggtatcgttggcctgttacgttcggccaagggaccaaggtggaaatcaaacgg

SEQ ID NO: 366 - DNA, 324 bp, Artificial Sequence
  Chemically synthesized ABT1-95-143
gacatccagatgacccagtctccatcctccctgtctgcatctgtaggagaccgtgtcaccatcacttgccgggcaagtcagccgattgtgcggaacttaaggtggtatcagcagaaaccagggaaagcccctaagctcctgatcacgtcttcgtcctatttggagcccggggtcccatcacgtttcagtggtagtggatccgggacagatttcactctcaccatcagcagtctgcaacccgaagattttgctacgtaccactgtcaacaggggtatcgttggcctgttacgttcggccaagggaccaaggtggaaatcaaacgg

SEQ ID NO: 367 - DNA, 324 bp, Artificial Sequence
  Chemically synthesized ABT1-95-144
gacatccagatgacccagtctccatcctccctgtctgcatctgtaggagaccgtgtcaccatcacttgccgggcaagtcagccgattgtgcggaacttaaggtggtatcagcagaaacctgggaaagcccctaagctcctgatctattcttcgtcctatttgagccccggggtcccatcacgtttcagtggtagtggatccgggacagatttcactctcaccatcagcagtctgcaacccgaagattttgctacgtaccactgtcaacaggggtatcgttggcctgttacgttcggccaagggaccaaggtggaaatcaaacgg

SEQ ID NO: 368 - DNA, 324 bp, Artificial Sequence
  Chemically synthesized ABT1-95-145
gacatccagatgacccagtctccatcctccctgtctgcatctgtaggagaccatgtcaccatcacttgccgggcaagtcagccgattgtgcggaacttaaggtggtatcagcagaaaccagggaaagcccctaagctcctgatctattcttcgtcctatttggtccccggggtcccatcacgtttcagtggtagtggatccgggacagatttcactctcaccatcagcagtctgcaacccgaagattttgctacgtaccactgtcaacaggggtatcgttggcctgttacgttcggccaagggaccaaggtggaaatcaaacgg

SEQ ID NO: 369 - DNA, 324 bp, Artificial Sequence
  Chemically synthesized ABT1-95-146
gacatccagatgacccagtctccatcctccctgtctgcatctgtaggagaccgtgtcaccatcacttgccgggcaagtcagaacattgtgcggaacttaaggtggtatcagcagaaaccagggaaagcccctaagctcctgatctattcttcgtcctatttggagcccggggtcccatcacgtttcagtggtagtggatccgggacagatttcactctcaccatcagcagtctgcaacccgaagattttgctacgtaccactgtcaacaggggtatcgttggcctgttacgttcggccaagggaccaaggtggaaatcaaacgg

SEQ ID NO: 370 - DNA, 324 bp, Artificial Sequence
  Chemically synthesized ABT1-95-147
gacatccagatgacccagtctccatcctccctgtctgcatctgtaggagaccgtgtcaccatcacttgctgggcaagtcaggggattgtgcggaacttaaggtggtatcagcagaaaccagggaaagcccctaagctcctgatctattcttcgtcctatttggagcccggggtcccatcacgtttcagtggtagtggatccgggacagatttcactctcaccatcagcagtctgcaacccgaagattttgctacgtaccactgtcaacaggggtatcgttggcctgttacgttcggccaagggaccaaggtggaaatcaaacgg

SEQ ID NO: 371 - DNA, 324 bp, Artificial Sequence
  Chemically synthesized ABT1-95-148
gacatccagatgacccagtctccatcctccctgtctgcatctgtaggagaccgtgtcaccatcacttgccgggcaagtcagaccattgtgcggaacttaaggtggtatcagcagaaaccagggaaagcccctaagctcctgatctattcttcgtcctatttggagcccggggtcccatcacgtttcagtggtagtggatccgggacagatttcactctcaccatcagcagtctgcaacccgaagattttgctacgtaccactgtcaacaggggtatcgttggcctgttacgttcggccaagggaccaaggtggaaatcaaacgg

SEQ ID NO: 372 - DNA, 324 bp, Artificial Sequence
  Chemically synthesized ABT1-95-149
gacatccagatgacccagtctccatcctccctgtctgcatctgtaggagaccgtgtcaccatcacttgccgggcaagtcaggcgattgtgcggaacttaaggtggtatcagcagaaaccagggaaagcccctaagctcctgatctattcttcgtcctatttggagcccggggtcccatcacgtttcagtggtagtggatccgggacagatttcactctcaccatcagcagtctgcaacccgaagattttgctacgtaccactgtcaacaggggtatcgttggcctgttacgttcggccaagggaccaaggtggaaatcaaacgg

SEQ ID NO: 373 - DNA, 324 bp, Artificial Sequence
  Chemically synthesized ABT1-95-150
gacatccagatgacccagtctccatcctccctgtctgcatctgtaggagaccgtgtcaccatcacttgccgggcaagtcagcacattgtgcggaacttaaggtggtatcagcagaaaccagggaaagcccctaagctcctgatctattcttcgtcctatttggagcccggggtcccatcacgtttcagtggtagtggatccgggacagatttcactctcaccatcagcagtctgcaacccgaagattttgctacgtaccactgtcaacaggggtatcgttggcctgttacgttcggccaagggaccaaggtggaaatcaaacgg

SEQ ID NO: 374 - DNA, 324 bp, Artificial Sequence
  Chemically synthesized ABT1-95-151
gacatccagatgacccagtctccatcctccctgtctgcatctgtaggagaccgtgtcaccatcacttgccgggcaggtcagccgattgtgcggaacttaaggtggtatcagcagaaaccagggaaagcccctaagctcctgatctattcttcgtcctatttggagcccggggtcccatcacgtttcagtggtagtggatccgggacagatttcactctcaccatcagcagtctgcaacccgaagattttgctacgtaccactgtcaacaggggtatcgttggcctgttacgttcgaccaagggaccaaggtggaaatcaaacgg

SEQ ID NO: 375 - DNA, 324 bp, Artificial Sequence
  Chemically synthesized ABT1-95-152
gacatccagatgacccagtctccatcctccctgtctgcatctgtaggagaccgtgtcaccatcacttgccgggcaggtcagccgattccgcggaacttaaggtggtatcagcagaaaccagggaaagcccctaagctcctgatctattcttcgtcctatttggagcccggggtcccatcacgtttcagtggtagtggatccgggacagatttcactctcaccatcagcagtctgcaacccgaagattttgctacgtaccactgtcaacaggggtatcgttggcctgttacgttcggccaagggaccaaggtggaaatcaaacgg

SEQ ID NO: 376 - DNA, 324 bp, Artificial Sequence
  Chemically synthesized ABT1-95-153
gacatccagatgacccagtctccatcctccctgtctgcatctgtaggagaccgtgtcaccatcacttgccgggcaagtcagccgattatccggaacttaaggtggtatcagcagaaaccagggaaagcccctaagctcctgatctattcttcgtcctatttggagcccggggtcccatcacgtttcagtggtagtggatccgggacaggtttcactctcaccatcagcagtctgcaacccgaagattttgctacgtaccactgtcaacaggggtatcgttggcctgttacgttcggccaagggaccaaggtggaaatcaaacgg

SEQ ID NO: 377 - DNA, 324 bp, Artificial Sequence
  Chemically synthesized ABT1-95-154
gacatccagatgacccagtctccatcctccctgtctgcatctgtaggagaccgtgtcaccatcacttgccgggcaagtcagccgattgtgcggaacttaaggtggtatcagcagaaaccagggaaagcccctaagctcctgatctcctcttcgtcctatttggagcccggggtcccatcacgtttcagtggtagtggatccgggacagatttcactctcaccatcagcagtctgcaacccgaagattttgctacgtaccactgtcaacaggggtatcgttggcctgttacgttcggccaagggaccaaggtggaaatcaaacgg

SEQ ID NO: 378 - DNA, 324 bp, Artificial Sequence
  Chemically synthesized ABT1-95-155
gacatccagatgacccagtctccatcctccctgtctgcatctgtaggagaccgtgtcaccatcacttgccgggcaagtcagccgattgtgcggaacttaaggtggtatcagcagaaaccagggaaagcccctaagctcctgatcacctcttcgtcctatttggagcccggggtcccatcacgtttcagtggtagtggatccgggacagatttcactctcaccatcagcagtctgcaacccgaagattccgctacgtaccactgtcaacaggggtatcgttggcctgttacgttcggccaagggaccaaggtggaaatcaaacgg

SEQ ID NO: 379 - DNA, 324 bp, Artificial Sequence
  Chemically synthesized ABT1-95-156
gacatccagatgacccagtctccatcctccctgtctgcatctgtaggagaccgtgtcaccatcacttgccgggcaagtcagccgattgtgcggaacttaaggtggtatcagcagaaaccagggaaagcccctaagctcctgatcgcctcttcgtcctatttggagcccggggtcccatcacgtttcagtggtagtggatccgggacagatttcactctcaccatcagcagtctgcaacccgaagattttgctacgtaccactgtctacaggggtatcgttggcctgttacgttcggccaagggaccaaggtggaaatcaaacgg

SEQ ID NO: 380 - DNA, 324 bp, Artificial Sequence
  Chemically synthesized ABT1-95-157
gacatccagatgacccagtctccatcctccctgtctgcatctgtaggagaccgtgtcaccatcacttgccgggcaagtcagccgattgtgcggaacttaaggtggtatcagcagaaaccagggaaagcccctaagctcctgatcacgtcttcgtcctatttggagcccggggtcccatcacgtttcagtggtagtggatccggggcagatttcactctcaccatcagcagtctgcaacccgaagattttgctacgtaccactgtcaacaggggtatcgttggcctgttacgttcggccaagggaccaaggtggaaatcaaacgg

SEQ ID NO: 381 - DNA, 324 bp, Artificial Sequence
  Chemically synthesized ABT1-95-158
gacatccagatgacccagtctccatcctccctgtctgcatctgtaggagaccgtgtcaccatcacttgccgggcaagtcagccgattgtgcggaacttaaggtggtatcagcagaaaccagggaaagcccctaagctcctgatcttctcttcgtcctatttggagcccggggtcccatcacgtttcagtggtagtggatccgggacagatttcactctcaccatcagcagtctgcaacccgaagattttgctacgtaccactgtcaacaggggtatcgttggcctgttacgttcggccaagggaccaaggtggaaatcaaacgg

SEQ ID NO: 382 - DNA, 324 bp, Artificial Sequence; identical to SEQ ID NO: 344
  Chemically synthesized ABT1-95-159

SEQ ID NO: 383 - DNA, 324 bp, Artificial Sequence
  Chemically synthesized ABT1-95-160
gacatccagatgacccagtctccatcctccctgtctgcatctgtaggagaccgtgtcaccatcacttgccgggcaagtcagccgattgtgcggaacttaaggtggtatcagcagaaaccagggaaagcccctaagctcctgatctattcttcatcctatttggagcccggggtcccatcacgtttcagtggtagtggatccgggacagatttcactctcaccatcagcagtctgcaacccgaagattttgctacgtaccactgtcaacaggggtatgtgtggcctgttacgttcggccaagggaccaaggtggaaatcaaacgg

SEQ ID NO: 384 - DNA, 324 bp, Artificial Sequence
  Chemically synthesized ABT1-95-161
gacatccagatgacccagtctccatcctccctgtctgcatctgtaggagaccgtgtcaccatcacttgccgggcaagtcagccgattgtgcggaacttaaggtggtatcagcagaaaccagggaaagcccctaagctcctgatctattcttcgtcctatttggagcccggggtcccatcacgtttcagtggtagtggatccgggacagatttcactctcaccatcagcagtctgcaacccgaagattttgctacgtaccactgtcaacaggggtatcgttggcctccgacgttcggccaagggaccaaggtggaaatcaaacgg

SEQ ID NO: 385 - DNA, 324 bp, Artificial Sequence
  Chemically synthesized ABT1-95-162
gacatccagatgacccagtctccatcctccctgtctgcatctgtaggagaccgtgtcaccatcacttgccgggcaagtaagccgattgtgcggaacttaaggtggtatcagcagaaaccagggaaagcccctaagctcctgatctattcttcgtcctatttggagcccggggtcccatcacgtttcagtggtagtggatccgggacagatttcactctcaccatcagcagtctgcaacccgaagattttgctacgtaccactgtcaacaggggtatcgttggcctgttacgttcggccaagggaccaaggtggaaatcaaacgg

SEQ ID NO: 386 - DNA, 324 bp, Artificial Sequence
  Chemically synthesized ABT1-95-163
gacatccagatgacccagtctccatcctccctgtctgcatctgtaggagaccgtgtcaccatcacttgccgggcaagtaggccgattgtgcggaacttaaggtggtatcagcagaaaccagggaaagcccctaagctcctgatctattcttcgtcctatttggagcccggggtcccatcacgtttcagtggtagtggatccgggacagatttcactctcaccatcagcagtctgcaacccgaagattttgctacgtaccactgtcaacaggggtatcgttggcctgttacgttcggccaagggaccaaggtggagatcaaacgg

SEQ ID NO: 387 - DNA, 324 bp, Artificial Sequence
  Chemically synthesized ABT1-95-164
gacatccagatgacccagtctccatcctccctgtctgcatctgtaggagaccgtgtcaccatcacttgtcgggcaagtcagccgggagtgcggaacttaaggtggtatcagcagaaaccagggaaagcccctaagctcctgatctattcttcgtcctatttggagcccggggtcccatcacgtttcagtggtagtggatccgggacagatttcactctcaccatcagcagtctgcaacccgaagattttgctacgtaccactgtcaacaggggtatcgttggcctgttacgttcggccaagggaccaaggtggaaatcaaacgg

SEQ ID NO: 388 - DNA, 324 bp, Artificial Sequence
  Chemically synthesized ABT1-95-165
gacatccagatgacccagtctccatcctccctgtctgcatctgtaggagaccgtgtcaccatcacttgccgggcaagtcagccgattgtgcggaacatgaggtggtatcagcagaaaccagggaaagcccctaagctcctgatctattcttcgtcctatttggagcccggggtcccatcacgtttcagtggtagtggatccgggacagatttcactctcaccatcagcagtctgcaacccgaagattttgctacgtaccactgtcaacaggggtatcgttggcctgttacgttcggccaagggaccaaggtggaaatcaaacgg

SEQ ID NO: 389 - DNA, 324 bp, Artificial Sequence
  Chemically synthesized ABT1-95-166
gacatccagatgacccagtctccatcctccctgtctgcatctgtaggagaccgtgtcaccatcacttgccgggcaagtcagccgattgtgcggaacttaaggtggtatcagcagaaaccagggaaagcccctaagctcctgatctattctaagtcctatttggagcccggggtcccatcacgtttcagtggtagtggatccgggacagatttcactctcaccatcagcagtctgcaacccgaagattttgctacgtaccactgtcaacaggggtatcgttggcctgttacgttcggccaagggaccaaggtggaaatcaaacgg

SEQ ID NO: 390 - DNA, 324 bp, Artificial Sequence
  Chemically synthesized ABT1-95-167
gacatccagatgacccagtctccatcctccctgtctgcatctgtaggagaccgtgtcaccatcacttgccgggcaagtcagccgattgtgcggaacttaaggtggtatcagcagaaaccagggaaagcccctaagctcctgatctattctcggtcctatttggagcccggggtcccatcacgtttcagtggtagtggatccggggcagatttcactctcaccatcagcagtctgcaacccgaagattttgctacgtaccactgtcaacaggggtatcgttggcctgttacgttcggccaagggaccaaggtggaaatcaaacgg

SEQ ID NO: 391 - DNA, 324 bp, Artificial Sequence
  Chemically synthesized ABT1-95-168
gacatccagatgacccagtctccatcctccctgtctgcatctgtaggagaccgtgtcaccatcacttgccgggcaagtcagccgattgtgcggaacttaaggtggtatcagcagaaaccagggaaagcccctaagctcctgatctattcttcgtcctttttggagcccggggtcccatcacgtttcagtggtagtggatccgggacagatttcactctcaccatcagcagtctgcaacccgaagattttgctacgtaccactgtcaacaggggtatcgttggcctgttacgttcggccaagggaccaaggtggaaatcaaacgg

SEQ ID NO: 392 - DNA, 324 bp, Artificial Sequence
  Chemically synthesized ABT1-95-169
gacatccagatgacccagtctccatcctccctgtctgcatctgtaggagaccgtgtcaccatcacttgccgggcaagtcagccgattgtgcggaacttaaggtggtatcagcagaaaccagggaaagctcctaagctcctgatctatgcagtgtcctatttggagcccggggtcccatcacgtttcagtggtagtggatccgggacagatttcactctcaccatcagcagtctgcaacccgaagattttgctacgtaccactgtcaacaggggtatcgttggcctgttacgttcggccaagggaccaaggtggaaatcaaacgg

SEQ ID NO: 393 - DNA, 324 bp, Artificial Sequence
  Chemically synthesized ABT1-95-170
gacatccagatgacccagtctccatcctccctgtctgcatctgtaggagaccgtgtcaccatcacttgccgggcaagtaggccgattgtgcggaacttaaggtggtatcagcagaaaccagggaaagcccctaagctcctgatctatgcgtcgtcctatttggagcccggggtcccatcacgtttcagtggtagtggatccgggacagatttcactctcaccatcagcagtctgcaacccgaagattttgctacgtaccactgtcaacaggggtatcgttggcctgttacgttcggccaagggaccaaggtggaaatcaaacgg

SEQ ID NO: 394 - DNA, 324 bp, Artificial Sequence
  Chemically synthesized ABT1-95-171
gacatccagatgacccagtctccatcctccctgtctgcatctgtaggagaccgtgtcaccatcacttgccgggcaagtaggccgattgtgcggaacttaaggtggtatcagcagaaaccagggaaagcccctaagctcctgatctattctgtgtcctatttggagcccggggtcccatcacgtttcagtggtagtggatccgggacagatttcactctcaccatcagcagtctgcaacccgaagattttgctacgtaccactgtcaacaggggtatcgttggcctgttacgttcggccaagggaccaaggtggaaatcaaacgg

SEQ ID NO: 395 - DNA, 324 bp, Artificial Sequence
  Chemically synthesized ABT1-95-172
gacatccagatgacccagtctccatcctccctgtctgcatctgtaggagaccgtgtcaccatcacttgccgggcaagtaggccgattgtgcggaatttaaggtggtatcagcagaaaccagggaaagctcctaagctcctgatctatgcagtgtcctatttggagcccggggtcccatcacgtttcagtggtagtggatccgggacagatttcactctcaccatcagcagtctgcaacccgaagattttgctacgtaccactgtcaacaggggtatcgttggcctgttacgttcggccaagggaccaaggtggaaatcaaacgg

SEQ ID NO: 396 - DNA, 324 bp, Artificial Sequence
  Chemically synthesized ABT1-95-173
gacatccagatgacccagtctccatcctccctgtctgcatctgtaggagaccgtgtcaccatctcttgccgggcaagtaggccgattgtgcggaacttaaggtggtatcagcagaaaccagggaaagcccctaagctcctgatctattcttcgtcctatttggagcccggggtcccatcacgtttcagtggtagtggatccgggacagatttcactctcaccatcagcagtctgcaacccgaagattttgctacgtaccactgtcgccaggggtatcgttggcctgttacgttcggccaagggaccaaggtggaaatcaaacgg

SEQ ID NO: 397 - DNA, 324 bp, Artificial Sequence
  Chemically synthesized ABT1-95-174
gacatccagatgacccagtctccatcctccctatctgcatctgtaggagaccgtgtcaccatcacttgccgggcaagtaggccgattgtgcggaacttaaggtggtatcagcagaaaccagggaaagcccctaagctcctgatctattctgtgtcctatttggagcccggggtcccatcacgtttcagtggtagtggatccgggacagatttcactctcaccatcagcagtctgcaacccgaagattttgctacgtaccactgtcggcaggggtatcgttggcctgttacgttcggccaagggaccaaggtggaaatcaaacgg

SEQ ID NO: 398 - DNA, 324 bp, Artificial Sequence
  Chemically synthesized ABT1-95-175
gacatccagatgacccagtctccatcctccctgtctgcatctgtaggagaccgtgtcaccatcacttgccgggcaagtaggccgattgtgcggaacttaaggtggtatcagcagaaaccagggaaagcccctaagctcctgatctatgcgtcgtcctatttggagcccggggtcccatcacgtttcagtggtagtggatccgggacagatttcactctcaccatcagcagtctgcaacccgaagattttgctacgtaccactgtcggcaggggtatcgttggcctgttacgttcggccaagggaccaaggtggaaatcaaacgg

SEQ ID NO: 399 - DNA, 324 bp, Artificial Sequence
  Chemically synthesized ABT1-95-176
gacatccagatgacccagtctccatcctccctgtctgcatctgtaggagaccgtgtcaccatcacttgccgggcaagtaggccaattgtgcggaacttaaggtggtatcagcagaaaccagggaaagctcctaagctcctgatctatgcagtgtcctatttggagcccggggtcccatcacgtttcagtggtagtggatccgggacagatttcactctcaccatcagcagtctgcaacccgaagattttgctacgtaccactgtcggcaggggtatcgttggcctgttacgttcggccaagggaccaaggtggaaatcaaacgg

SEQ ID NO: 400 - DNA, 324 bp, Artificial Sequence
  Chemically synthesized ABT1-95-177
gacatccagatgacccagtctccatcctccctgtctgcatctgtaggagaccgtgtcaccatcacttgccgggcaagtcagccgattgtgcggaacttaaggtggtatcagcagaaaccagggaaagcccctaagctcctgatctatgcgtcgtcctatttggagcccggggtcccatcacgtttcagtggtagtggatccgggacagatttcactctcaccatcagcagtctgcaacccgaagattttgctacgtaccactgtcggcaggggtatcgttggcctgttacgttcggccaagggaccaaggtggaaatcaaacgg

SEQ ID NO: 401 - DNA, 324 bp, Artificial Sequence
  Chemically synthesized ABT1-95-178
gacatccagatgacccagtctccatcctccctgtctgcatctgtaggagaccgtgtcaccatcacttgccgggcaagtcagccgattgtgcggaacttaaggtggtatcagcagaaaccagggaaagcccctaagctcctgatctattctgtgtcctatttggagcccggggtcccatcacgtttcagtggtagtggatccgggacagatttcactctcaccatcagcagtctgcaacccgaagattttgctacgtaccactgtcggcaggggtatcgttggcctgttacgttcggccaagggaccaaggtggaaatcaaacgg

SEQ ID NO: 402 - DNA, 324 bp, Artificial Sequence
  Chemically synthesized ABT1-95-179
gacatccagatgacccagtctccatcctccctgtctgcatctgtaggagaccgtgtcaccatcacttgccgggcaagtcagccgattgtgcggaacttaaggtggtatcagcagaaaccagggaaagcccctaagctcctgatctattcttcgtcctatttggagcccggggtcccatcacgtttcagtggtagtggatccgggacagatttcactctcaccatcagcagtctgcaacccgaagattttgctacgtaccactgtcggcaggggtatcgttggcctccgacgttcggccaagggaccaaggtggaaatcaaacgg

SEQ ID NO: 403 - DNA, 324 bp, Artificial Sequence
  Chemically synthesized ABT1-95-181
gacatccagatgacccagtctccatcctccctgtctgcatctgtaggagaccgtgtcaccatcacttgccgggctagtaagccgatcgtgcgtaacatgaggtggtatcagcagaaaccagggaaagcccctaagctcctgatctattcggtgtcctatttggaacccggggtcccatcacgtttcagtggtagtggatccgggacagatttcactctcaccatcagcagtctgcaacccgaagattttgctacgtaccactgtcttcaggggtatcgttggcctcctacattcggccaagggaccaaggtggaaatcaaacgg

SEQ ID NO: 404 - DNA, 324 bp, Artificial Sequence
  Chemically synthesized ABT1-95-182
gacatccagatgacccagtctccatcctccctgtctgcatctgtaggagaccgtgtcaccatcacttgccgggctagtaagccgggtgtgcgtaacttgaggtggtatcagcagaaaccagggaaagcccctaagctcctgatctattcggtgtcctatttggaacccggggtcccatcacgtttcagtggtagtggatccgggacagatttcactctcaccatcagcagtctgcaacccgaagattttgctacgtaccactgtcttcaggggtatcgttggcctcctacattcggccaagggaccaaggtggaaatcaaacgg

SEQ ID NO: 405 - DNA, 324 bp, Artificial Sequence
  Chemically synthesized ABT1-95-183
gacatccagatgacccagtctccatcctccctgtctgcatctgtaggagaccgtgtcaccatcacttgccgggcaagtcggacgatagtgcggaacttacgttggtaccagcagaaaccagggaaagcccctaagctcctgatctattcaaggagctttttggagccgggggtcccatcacgtttcagtggtagtggatccgggacagatttcactctcaccatcagcagtctgcaacccgaagattttgctacgtaccactgtctacaggggtatcgttggcctcctacgttcggccaagggaccaaggtggaaatcaaacgg

SEQ ID NO: 406 - DNA, 324 bp, Artificial Sequence
  Chemically synthesized ABT1-95-184
gacatccagatgacccagtctccatcctccctgtctgcatctgtaggagaccgtgtcaccatcacttgccgggcaagtcggacgcctgtgcggaacttacgttggtatcagcagaaaccagggaaagcccctaagctcctgatctattcaaggagctatttggagccgggggtcccatcacgtttcagtggtagtggatccgggacagatttcactctcaccatcagcagtctgcaacccgaagattttgctacgtaccactgtctacaggggtatcgttggcctcctacgttcggccaagggaccaaggtggaaatcaaacgg

SEQ ID NO: 407 - DNA, 324 bp, Artificial Sequence
  Chemically synthesized ABT1-95-500
gacatccagatgacccagtctccatcctccctgtctgcatctgtaggagaccgtgtcaccatcacttgccgggcaagtcagccgattcatgggaatttacgttggtatcagcagaaaccagggaaagcccctaagctcctgatctataatatctccaatttgcaaagtggggtcccatcgcgtttcagtggcagtggatctggaacagatttcactctcaccatcagcagtctgcaacctgaagattttgctacgtaccactgtcaacaggggtatcgttggcctgttacgttcggccaagggaccaaggtggaaatcaaacgg

SEQ ID NO: 408 - DNA, 324 bp, Artificial Sequence
  Chemically synthesized ABT1-95-501
gacatccagatgacccagtctccatcctccctgtctgcatctgtaggagaccgtgtcaccatcacttgccgggcaagtcagccgattcatgggaatttacgttggtatcagcagaaaccggggaaagcccctaagctcctgatctatagtatttccaatttgcaaagtggggtcccatcacgtttcagtggcagtggatctgggacagatttcactctcaccatcagcagtctgcaacctgaagattttgctacgtactactgtcaacaggggtatcgttggcctgttacgttcggccaagggaccaaggtggaaatcaaacgg

SEQ ID NO: 409 - DNA, 324 bp, Artificial Sequence
  Chemically synthesized ABT1-95-502
gacatccagatgacccagtctccatcctccctgtctgtatctgtaggagaccgtgtcaccatcacctgccgggcaagtcagccgattcatgggaatttacgttggtatcagcagaaaccagggaaagcccctaagctcctgatctataatgtgtccaggttgcaaagtggggtcccatcacgtttcagtggcagtggatctgggacagatttcactctcaccatcagcagtctgcaacctgaagattttgctacgtactactgtcaacaggggtatcgttggcctgttacattcggccaagggaccaaggtggaaatcaaacgg

SEQ ID NO: 410 - DNA, 324 bp, Artificial Sequence
  Chemically synthesized ABT1-95-503
gacatccagatgacccagtctccatcctccctgtctgcatctgtaggagaccgtgtcaccatcacttgccgggcaagtcagccgattcatgggaatttacgttggtatcagcagaaaccagggaaagcccctaagctcctgatctataatgtgtccaggttgcaaagtggggtcccatcacgtttcagtggcagtggatctgggacagatttcactctcaccatcagcagtctgcaacctgaagattttgctacgtactactgtcaacaggggtatcgttggcctgttacgttcggccgagggaccaaggtggaaatcaaacgg

SEQ ID NO: 411 - DNA, 324 bp, Artificial Sequence
  Chemically synthesized ABT1-95-A1
gacatccagatgacccagtctccatcctccctgtctgcatctgtaggagaccgtgtcaccatcacttgccgagccagtcggccgggtgtgaggaacttaaggtggtatcagcagaaaccagggaaagcccctaagctcctgatctatcatgtgagcgatttggagcccggggtcccatcacgtttcagtggtagtggatccgggacagatttcactctcaccatcagcagtctgcaacccgaagattttgctacgtaccactgtcgacaggggtatgtttggcctgttcccttcgaccaagggaccaaggtggaaatcaaacgt

SEQ ID NO: 412 - DNA, 324 bp, Artificial Sequence
  Chemically synthesized ABT1-95-A2
gacatccagatgacccagtctccatcctccctgtctgcatctgtaggagaccgtgtcaccatcacttgccggatacttcagccccctggcaggaacttaaggtggtatcagcagaaaccagggaaagcccctaagctcctgatctattcaaagagctttttggagcccggggtcccatcacgtttcagtggtagtggatccgggacagatttcactctcaccatcagcagtctgcaacccgaagattttgctacgtaccactgtcaacaggggtatcgttggcctgttacgttcggccaagggaccaaggtggaaatcaaacgt

SEQ ID NO: 413 - DNA, 324 bp, Artificial Sequence
  Chemically synthesized ABT1-95-A3
gacatccagatgacccagtctccatcctccctgtctgcatctgtaggagaccgtgtcaccatcacttgccgggctagtaagccgggtgtgcgtaacatgaggtggtatcagcagaaaccagggaaagcccctaagctcctgatctattcggtgtcctatttggaacccggggtcccatcacgtttcagtggtagtggatccgggacagatttcactctcaccatcagcagtctgcaacccgaagattttgctacgtaccactgtcttcaggggtatcgttggcctcctacattcggccaagggaccaaggtggaaatcaaacgg

SEQ ID NO: 414 - DNA, 324 bp, Artificial Sequence
  Chemically synthesized ABT1-95-A5
gacatccagatgacccagtctccatcctccctgtctgcatctgtaggagaccgtgtcaccatcacttgccgggcaagtcggacgcctgtgcggaacttacgttggtatcagcagaaaccagggaaagcccctaagctcctgatctattcaaggagctttttggagccgggggtcccatcacgtttcagtggtagtggatccgggacagatttcactctcaccatcagcagtctgcaacccgaagattttgctacgtaccactgtctacaggggtatcgttggcctcctacgttcggccaagggaccaaggtggaaatcaaacgg

SEQ ID NO: 415 - DNA, 324 bp, Artificial Sequence
  Chemically synthesized ABT1-95-A6
gacatccagatgacccagtctccatcctccctgtctgcatctgtaggagaccgtgtcaccatcacttgccgggctagtaagccgggtgtgcgtaacatgaggtggtatcagcagaaaccagggaaagcccctaagctcctgatctatgctaaatcctatttggagccgggggtcccatcacgtttcagtggtagtggatccgggacagatttcactctcaccatcagcagtctgcaacccgaagattttgctacgtaccactgtaaacaggggtatcgttggccagttcagttcggccaagggaccaaggtggaaatcaaacgg

SEQ ID NO: 416 - DNA, 324 bp, Artificial Sequence
  Chemically synthesized ABT1-119
gacatccagatgacccagtctccatcctccctgtctgcatctgtaggagaccgtgtcaccatcacttgccgggcaagtcaggcgattggtgagtggttaggttggtaccagcagaaaccagggaaagcccctaagctcctgatctataggacgtccgtgttgcaaagtggggtcccatcacgtttcagtggcagtggatctgggacagatttcactctcaccatcagcagtctgcaacctgaagattttgctacgtactactgtcaacagacttctttttttcctcctacgttcggccaagggaccaaggtggaaatcaaacgg

SEQ ID NO: 417 - DNA, 324 bp, Artificial Sequence
  Chemically synthesized ABT1-120
gacatccagatgacccagtctccatcctccctgtctgcatctgtaggagaccgtgtcaccatcacttgccgggcaagtcagaatatttctgtgcttttacgttggtaccagcagaaaccagggaaagcccctaagctcctgatctataatgcgtcccagttgcaaagtggggtcccatcacgtttcagtggcagtggatctgggacagatttcactctcaccatcagcagtctgcaacctgaagattttgctacgtactactgtcaacagtggcggtttagtccccatacgttcggccaagggaccaaggtggaaatcaaacgg

SEQ ID NO: 418 - DNA, 324 bp, Artificial Sequence
  Chemically synthesized ABT1-121
gacatccagatgacccagtctccatcctccctgtctgcatctgtaggagaccgtgtcaccatcacttgccgggcaagtcagccgatttatactgagttatcttggtatcagcagaaaccagggaaagcccctaagctcctgatctatggttcgtccattttgcaaagtggggtcccatcacgtttcagtggcagtggatctgggacagatttcactctcaccatcagcagtctgcaacctgaagattttgctacgtactactgtcaacagtttgcgtatcatcctgtgacgttcggccaagggaccaaggtggaaatcaaacgg

SEQ ID NO: 419 - DNA, 324 bp, Artificial Sequence
  Chemically synthesized ABT1-122
gacatccagatgacccagtctccatcctccctgtctgcatctgtaggagaccgtgtcaccatcacttgccgggcaagtcagccgatttggactgagttaaattggtatcagcagaaaccagggaaagcccctaagctcctgatctatgggtcgtcctcgttgcaaagtggggtcccatcacgtttcagtggcagtggatctgggacagatttcactctcaccatcagcagtctgcaacctgaagattttgctacgtactactgtcaacagtttgcttattttcctgctacgttcggccaagggaccaaggtggaaatcaaacgg

SEQ ID NO: 420 - DNA, 324 bp, Artificial Sequence
  Chemically synthesized ABT1-122-18
gacatccagatgacccagtctccatcctccctgtctgcatctgtaggagaccgtgtcaccatcacttgccgggcaagtcagccgatttggactgagttaaattggtatcagcagaaaccagggaaagcccctaagctcctggtctatgggtcgtcctcgttgcaaagtggggtcccatcacgtttcagtggcagtggatctgggacagatttcactctcaccatcagcagtctgcaacctgaagattttgctacgtactactgtcaacagtttgcttattttcctgctacgttcggccaagggaccaaggtggaaatcaaacgg

SEQ ID NO: 421 - DNA, 324 bp, Artificial Sequence
  Chemically synthesized ABT1-122-21
gacatccagatgacccagtctccatcctccctgtctgcatctgtaggagaccgtgtcaccatcacatgccgggcaagtcagccgatttggactgagttaaattggtatcagcagaaaccagggaaagcccctaagctcctgatctatgggtcgtcctcgttgcaaagtggggtcccaacacgtttcagtggcagtggatctgggacagatttcactctcaccatcagcagtctgcaacctgaagattttgctacgtactactgtcaacagtttgcttattttcctgctacgttcggccaagggaccaaggtggaaatcaaacgg

SEQ ID NO: 422 - DNA, 324 bp, Artificial Sequence
  Chemically synthesized ABT1-122-511
gacatccagatgacccagtctccatcctccctgtctgcatctgtaggagaccgtgtcaccatcacttgccgggcaagtcagccgatttggactgagttaaattggtatcagcagaaaccagggaaagcccctaagctcctgatctatgggtcgtcctcgttgcaaagaggggtcccatcacgtttcagtggcagtggatctgggacagatttcactctcaccatcagcagtctgcaacctgaagattttgctacgtactactgtaaacagtttgcttattttcctgctacgttcggccaagggaccaaggtggaaatcaaacgg

SEQ ID NO: 423 - DNA, 325 bp, Artificial Sequence
  Chemically synthesized ABT1-122-750X
gacatccagatgacccagtctccatcctccctgtctgcatctgtaggagaccgtgtcgccatcacttgctcggcatctcagcatatttggactgagatatcttggtatcagcagaaaccagggaaagcccctaagctcctgatctatggctcggcctcgcggcaaaaaggggtcccatcacgtttcagtggcagtggatctgggacagatttcactctcaccatcagcagtctgcaacctgaagattttgctacgtactactgtaaacagtttgcttattttcctaatacgttcggccaagggaccaaggtggaaatcaaacggg

SEQ ID NO: 424 - DNA, 324 bp, Artificial Sequence
  Chemically synthesized ABT1-123
gacatccagatgacccagtctccatcctccctgtctgcatctgtaggagaccgtgtcaccatcacttgccgggcaagtcagagcatttggacggagttaaagtggtaccagcagaaaccagggaaagcccctaagctcctgatctatggtgcatccctgttgcaaagtggggtcccatcacgtttcagtggcagtggatctgggacagatttcactctcaccatcagcagtctgcaacctgaagattttgctacgtactactgtcaacagtttgcttatcatcctcatacgttcggccaagggaccaaggtggaaatcaaacgg

SEQ ID NO: 425 - DNA, 324 bp, Artificial Sequence
  Chemically synthesized ABT1-124
gacatccagatgacccagtctccatcctccctgtctgcatctgtaggagaccgtgtcaccatcacttgccgggcaagtcagtcgattgagggtaatttacggtggtaccagcagaaaccagggaaagcccctaagctcctgatctataatgtgtcccttttgcaaagtggggtcccatcacgtttcagtggcagtggatctgggacagatttcactctcaccatccgcagtctgcaacctgaagattttgctacgtactactgtcaacaggggtatcgttatcctcctacgttcggccaagggaccaaggtggaaatcaaacgg

SEQ ID NO: 426 - DNA, 324 bp, Artificial Sequence
  Chemically synthesized ABT1-125
gacatccagatgacccagtctccatcctccctgtctgcatctgtaggagaccgtgtcaccatcacttgccgggcaagtcagtcgattcagaagtttttaaattggtaccagcagaaaccagggaaagcccctaagctcctgatctatcggggttccgggttgcaaagtggggtcccaacacgtttcagtggcagtggatctgggacagatttcactctcaccatcagcagtctgcaacctgaggattttgctacgtactactgtcaacaggagtatcggatgcctcttacgttcggccaagggaccaaggtggaaatcaaacgg

SEQ ID NO: 427 - DNA, 324 bp, Artificial Sequence
  Chemically synthesized ABT1-126
gacatccagatgacccagtctccatcctccctgtctgcatctgtaggagaccgtgtcaccatcacttgccgggcaagtcagtctatttataagtatttaagttggtaccagcagaaaccagggaaagcccctatgctcctgatctatagggggtcccatttgcaaagtggggtcccatcacgtttcagtggcagtggatctgggacagatttcactctcaccatcagcagtctgcaacctgaagattttgctacgtactactgtcaacagtatgcgttttcgccttttacgttcggccaagggaccaaggtagaaatcaaacgg

SEQ ID NO: 428 - DNA, 324 bp, Artificial Sequence
  Chemically synthesized ABT1-127
gacatccagatgacccagtctccatcctccctgtctgcatctgtaggagaccgtgtcaccatcacttgccgggcaagtcagagtattaggtattatttaaattggtatcagcagaaaccagggaaagcccctaagctcctgatctattgggattccaagttgcaaagtggggtcccatcacgtttcagtagcagtggatctgggacagatttcactctcaccatcagcagtctgcaacctgaagattttgctacgtactactgtcaacagactgcgtcggctccttttacgttcggccaagggaccaaggtggaaatcaaacgg

SEQ ID NO: 429 - DNA, 324 bp, Artificial Sequence
  Chemically synthesized ABT1-128
gacatccagatgacccagtctccatcctccctgtctgcatctgtaggagaccgtgtcaccatcacttgccgggcaagtcagcctattagggagtttttacattggtatcagcagaaaccagggaaagcccctaagctcctgatctataggtcttcccgtttgcaaagtggggtcccatcacgtttcagtggcagtggatctgggacagatttcactctcaccatcagcagtctgcaacctgaagattttgctacgtactactgtcaacaggagtataggtatcctcttacgttcggccaagggaccaaggtggaaatcaaacgg

SEQ ID NO: 430 - DNA, 324 bp, Artificial Sequence
  Chemically synthesized ABT1-129
gacatccagatgacccagtctccatcctccctgtctgcatctgtaggggacagtgtcgccatcacttgccgggcaagtcagccgattggggcgtttttatcttggtaccagcagaaaccagggaaagcccctaagctcctgatctatgcgatttccaagttgcaaagtggggtcccatcacgtttcagtggcagtggatctgggacagatttcactctcaccatcagcagtctgcaacctgaagattttgctacgtactactgtcaacagcagatgatttcgcctcgtacgttcggccaagggaccaaggtggaaatcaaacgg

SEQ ID NO: 431 - DNA, 324 bp, Artificial Sequence
  Chemically synthesized ABT1-130
gacatccagatgacccagtctccatcctccctgtctgcatctgtaggagaccgtgtcaccatcacttgccgggcaagtcaggagattggtttgtggttatcttggtaccagcagaaatcagggaaagcccctaagctcctgatctatcggcattccagttcgcaaagtggggttccatcacgtttcagtggcagtggatctgggacagatttcactctcaccatcagcagtctgcaacctgaagattttgctacgtactactgtcaacagacttataaggcgccttttacgttcggccaagggaccaaggtggaaatcaaacgg

SEQ ID NO: 432 - DNA, 324 bp, Artificial Sequence
  Chemically synthesized ABT1-131
gacatccagatgacccagtctccatcttccctgtctgcatctgtaggagaccgtgtcaccatcacttgccgggcaagtcagaggattaatgggaatttacgttggtaccagcagaaaccagggaaagcccctaagctcctgatctattctgtttcccagttgcaaagtggggtcccatcacgtttcagtggcagtggatctgggacagatttcactctcaccatcagcagtctgcaacctgaagattttgctacgtactactgtcaacagggttatgattggcctcctacgttcggccaagggaccaaggtggaaaccaaacgg

SEQ ID NO: 433 - DNA, 324 bp, Artificial Sequence
  Chemically synthesized ABT1-132
gacatccagatgacccagtctccatcctccctgtctgcatctgtaggagaccgtgtcaccatcacttgccgggcaagtcagaatattgctacggcgttactttggtaccagcagaaaccagggaaagcccctaggctcctgatctatgattcgtcccagttgcaaagtggggtcccatcacgtttcagtggcagtggatctgggacagatttcactctcaccatcagcagtctgcaacctgaagattttgctacgtactactgtcaacagatgtattgggttccttttacgttcggccaagggaccaaggtggaaatcaaacgg

SEQ ID NO: 434 - DNA, 324 bp, Artificial Sequence
  Chemically synthesized ABT1-133
gacatccagatgacccagtctccatcctccctgtctgcatctgtaggagaccgtgtcaccatcacttgccgggcaagtcagtggattcagaagcagttagcgtggtatcagcagaaaccagggaaagcccctaagctcctgatctattcttcgtcctatttgcaaagtggggtcccatcacgtttcagtggcagtggatctgggacagatttcactctcaccatcagcagtctgcaacctgaagattttgctacgtactactgtcaacagacgatgactgctccttttacgttcggccaagggaccaaggtggaaatcaaacgg

SEQ ID NO: 435 - DNA, 324 bp, Artificial Sequence
  Chemically synthesized ABT1-134
gacatccagatgacccagtctccatcctccctgtctgcatctgtaggagaccgtgtcaccatcacttgccgggcaagtcagcatatttatgatatgttatcgtggtaccagctgaaaccagggaaagcccctaagctcctgatctatcgtacgtcccttttgcaaagtggggtcccatcacgtttcagtggcagtggatctgggacagatttcactcttaccatcagcagtctgcaacctgaagattttgctacgtactactgtcaacagaatcatcggaggcctcataggttcggccaagggaccaaggtggaaatcaaacgg

SEQ ID NO: 436 - DNA, 324 bp, Artificial Sequence
  Chemically synthesized ABT1-135
gacatccagatgacccagtctccatcctccctgtctgcatctgtaggagaccgtgtcaccatcacttgccgggcaagtcagtatattggtcggaagttaaggtggtatcagcagaaaccagggaaagcccttaagctcctgatctatcggacgtcccgtttgcaaagtggggtcccatcacgtttcagtggcagtggatctgggacagatttcactctcaccatcagcagtctgcaacctgaagattttgctacgtactactgtcaacagacggggcagcatcctcatacgttcggccaagggaccaaggtggaaatcaaacgg

SEQ ID NO: 437 - DNA, 324 bp, Artificial Sequence
  Chemically synthesized ABT1-136
gacatccagatgacccagtctccatcctccctgtctgcatctgtaggagaccgtgtcaccatcacttgccgggcaagtcaggatattgcgaataatttagtgtggtaccagcagaaaccagggaaagcccctaagctcctgatctataggcattcctttttgcaaagtggggtcccatcacgtttcagtggcagtggatctgggacagatttcactctcaccatcagcagtctgcaacctgaagattttgctacgtactactgtcaacagatgcagcaggctccttttacgtccggccaagggaccaaggtggaaatcaaacgg

SEQ ID NO: 438 - DNA, 324 bp, Artificial Sequence
  Chemically synthesized ABT1-141
gacatccagatgacccagtctccatcctccctgtctgcatctgtaggagaccgtgtcaccatcacttgccgggcaagtcagtggattcagaagcagttagcgtggtatcagcagaaaccagggaaagcccctaagctcctgatctattcttcgtcctatttgcaaagtggggtcccatcacgtttcagtggcagtggatctgggacagatttcactctcaccatcagcagtctgcaacctgaagattttgctacgtactactgtcaacagcatctgagggtgccttttacgttcggccaagggaccaaggtggaaatcaaacgg

SEQ ID NO: 439 - DNA, 324 bp, Artificial Sequence
  Chemically synthesized ABT1-141-1
gacatccagatgacccagtctccatcctccctgtctgcatctgtaggagaccgtgtcaccatcacttgccgggcaagtcagtggattcagaagcagttagcgtggtaccagcagaaaccagggaaagcccctaagctcctgatctatagtggttcctggttgcaaagtggggtcccatcacgtttcagtggcagtggatctgggacagatttcactctcaccatcagcagtctgcaacctgaagattttgctacgtactactgtcaacagcatctgagggtgccttttacgctcggccaagggaccaaggtggaaatcaaacgg

SEQ ID NO: 440 - DNA, 324 bp, Artificial Sequence
  Chemically synthesized ABT1-141-2
gacatccagatgacccagtctccatcctccctgtctgcatctgtaggagaccgtgtcaccatcacttgccgggcaagtcagtggatacagaagcagttagcgtggtaccagcagaaaccagggaaagcccctaagctcctgatctatagtgcgtcctggttgcaaagtggggtcccatcacgtttcagtggcagtggatctgggacagatttcactctcaccatcagcagtctgcaacctgaagattttgctacgtactactgtcaacagcatctgagggtgccttttacgctcggccaagggaccaaggtggaaatcaaacgg

SEQ ID NO: 441 - DNA, 324 bp, Artificial Sequence
  Chemically synthesized ABT1-141-3
gacatccagatgacccagtctccatcctccctgtctgcatctgtaggagaccgtgtcaccatcacttgccgggcaagtcagtggattcagaagcagttagcgtggtaccagcagaaaccagggaaaacccctaagctcctgatctatagtcagtcccatttgcaaagtggggtcccatcacgtttcagtggcagtggatctgggacagatttcactctcaccatcagcagtctgcaacctgaagattttgctacgtactactgtcaacagcatctgagggtgccttttacgttcggccaagggaccaaggtggaaatcaaacgg

SEQ ID NO: 442 - DNA, 324 bp, Artificial Sequence
  Chemically synthesized ABT1-141-6
gacatccagatgacccagtctccatcctccctgtctgcatccgtaggagaccgtgtcaccatcacttgccgggcaagtcagtggattcagaagcagttagcgtggtatcagcagaaaccagggaaagcccctaagctcctgatctattcttcgtcctatttgcaaagtggggtcccatcacgtttcagtggcagtggatctgggacagatttcactctcaccatcagcagtctgcaacctgaagattttgctacgtactactgtctacagcatctgagggtgccttttacgttcggccaagggaccaaggtggaaatcaaacgg

SEQ ID NO: 443 - DNA, 324 bp, Artificial Sequence
  Chemically synthesized ABT1-141-7
gacatccagatgacccagtctccatcctccctgtctgcatctgtaggagaccgtatcaccatcacttgccgggcaagtcagtggattcagaagcagttagcgtggtaccagctgaaaccagggaaagcccctaagctcctgatctattcttcgtcctatttgcaaagtggggtcccatcacgtttcagtggcagtggatctgggacagatttcactctcaccatcagcagtctgcaacctgaagattttgctacgtactactgtcaacagcatctgagggtgccttttacgttcggccaagggaccaaggtggaaatcaaacgg

SEQ ID NO: 444 - DNA, 324 bp, Artificial Sequence
  Chemically synthesized ABT1-141-8
gacatccagatgacccagtctccatcctccctgtctgcatctgtaggagaccgtgtcaccatcacttgccgggcaagtcagtggattcagaagcagttagcgtggtaccagctgaaaccagggaaagcccctaagctcctgatctatagttcttcctggttgcaaagtggggtcccatcacgtttcagtggcagtggatctgggacagatttcactctcaccatcagcagtctgcaacctgaagattttgctacgtactactgtcaacagcatctgagggtgccttttacgttcggccaagggaccaaggtggaaatcaaacgg

SEQ ID NO: 445 - DNA, 324 bp, Artificial Sequence
  Chemically synthesized ABT1-141-9
gacatccaggtgacccagtctccatcctccctgtctgcatctgtaggagaccgtgtcaccatcacttgccgggcaagtcagtggattcagaagcagttagcgtggtaccagcagaaaccagggaaagcccctaagctcctgatctattcttcttcctggttgcaaagtggggtcccatcacgtttcagtggcagtggatctgggacagatttcactctcaccatcagcagtctgcaacctgaagattttgctacgtactactgtcaacagcatctgagggtgccttttacgttcggccaagggaccaaggtggaaatcaaacgg

SEQ ID NO: 446 - DNA, 324 bp, Artificial Sequence
  Chemically synthesized ABT1-141-10
gacatccagatgacccagtctccatcctccctgtctgcatctgtaggagaccgtgtcaccatcacttgccgggcaagtcagtggattcagaagcagttagcgtggtatcagcagaaaccagggaaagcccctaagctcctgatctattcttcgtcctatttgcaaagtggggtcccatcacgtttcagtggcagtggatctgggacagatttcactctcaccatcagcagtctgcaacctgaagattttgctacgtactactgtcaacagtcgcttcgggtgccctttacgttcggccaagggaccaaggtggaaatcaaacgg

SEQ ID NO: 447 - DNA, 324 bp, Artificial Sequence
  Chemically synthesized ABT1-141-11
gacatccagatgacccagtctccatcctccctgtctgcatctgtaggagaccgtgtcaccatcacttgccgggcaagtcagtggattcagaagcagttagcgtggtatcagcagaaaccagggaaagcccctaagctcctgatctattcttcgtcctatttgcaaagtggggtcccatcacgtttcagtggcagtggatctgggacagatttcactctcaccatcagcagtctgcaacctgaagattttgctacgtactactgtcaacagtggatgagtcctcctcgtacgttcggccaagggaccaaggtggaaatcaaacgg

SEQ ID NO: 448 - DNA, 324 bp, Artificial Sequence
  Chemically synthesized ABT1-141-12
gacatccagatgacccagtctccatcctccctgtctgcatctgtaggagaccgtgtcaccatcacttgccgggcaagtcagtggattcagaagcagttagcgtggtatcagcagaaaccagggaaagcccctaagctcctgatctattcttcgtcctatttgcaaagtggggtcccatcacgtttcagtggcagtggatctgggacagatttcactctcaccatcagcagtctgcaacctgaagattttgctacgtactactgtcaacagcatctgagggtgccttttacgatcggccaagggaccaaggtggaaatcaaacgg

SEQ ID NO: 449 - DNA, 324 bp, Artificial Sequence
  Chemically synthesized ABT1-141-13
gacatccagatgacccagtctccatcctccctgtctgcatctgtaggagaccgtgtcaccatcacttgccgggcaagtcagtggattcagaagcagttagcgtggtatcagcagaaaccagggaaagcccctaagctcctgatctattcttcgtcctatttgcaaagtggggtcccatcacgtttcagtggcagtggatctgggacagatttcactctcaccatcagcagtctgcaacctgaagattttgctacgtactactgtcaacagcatttgaggactcctccgacgttcggccaagggaccaaggtggaaatcaaacgg

SEQ ID NO: 450 - DNA, 324 bp, Artificial Sequence
  Chemically synthesized ABT1-141-14
gatattcagatgacccagagcccgagcagcctgagcgcgagcgtgggcgatcgtgtgaccattacctgccgtgcgagccagtggattcagaaacagctggcgtggtatcagcagaaaccgggcaaagcgccgcgtctgctgatttatagcagcagctatctgcagagcggcgtgccgagccgttttagcggcagcggcagcggcaccgattttaccctgaccattagcagcctgcagccggaagattttgcgacctattattgccagcagaacctgagcgtgccgtttacctttggccagggcaccaaagtggaaattaaacgt

SEQ ID NO: 451 - DNA, 324 bp, Artificial Sequence
  Chemically synthesized ABT1-141-15
gacatccagatgacccagtctccaccctccctgtctgcatctgtaggagaccgtgtcaccatcacttgccgggcaagtcagtggattcagaagcagttagcgtggtatcagcagaaaccagggaaagcccctaagctcctgatctattcttcgtcctatttgcaaagtggggtcccatcacgtttcagtggcagtggatctgggacagatttcactctcaccatcagcagtctgcaacctgaagattttgctacgtactactgtcaacagcatctgagggtgccttttacgttcggccaagggaccaaggtggaaatcaaacgg

SEQ ID NO: 452 - DNA, 324 bp, Artificial Sequence
  Chemically synthesized ABT1-141-16
gacatccagatgacccagtctccatcctccctgtctgcatctgtaggagaccgtgtcgccatcacttgccgggcaagtcagtggattcagaagcagttagcgtggtatcagcagaaaccagggaaagcccctaagctcctgatctattcttcgtcctatttgcaaagtggggtcccatcacgtttcagtggcagtggatctgggacagatttcactctcaccatcagcagtctgcaacctgaagattttgctacgtactactgtcaacatcatctgagggtgccttttacgttcggccaagggaccaaggtggaaatcaaacgg

SEQ ID NO: 453 - DNA, 324 bp, Artificial Sequence
  Chemically synthesized ABT1-141-17
gacatccagatgacccagtctccatcctccctgtctgcatctgtaggagaccgtgtcaccatcacttgccgggcaagtcagtggattcagaagcagttagcgtggtatcagctgaaaccagggaaagcccctaagctcctgatctattcttcgtcctatttgcaaagtggggtcccatcacgtttcagtggcagtggatctgggacagatttcactctcaccatcagcagtctgcaacctgaagattttgctacgtactactgtcaacagcatctgagggtgccttttacgttcggccaagggaccaaggtggaaatcaaacgg

SEQ ID NO: 454 - DNA, 324 bp, Artificial Sequence
  Chemically synthesized ABT1-141-18
gacatccagatgacccagtctccatcctccctgtctgcatctgtaggagaccgtgtcaccatcacttgccgggcaagtcagtggattcagaagcagttagcgtggtatcagcagaaaccagggaaagtccctaagctcctgatctattcttcgtcctatttgcaaagtggggtcccatcacgtttcagtggcagtggatctgggacagatttcactctcaccatcagcagtctgcaacctgaagattttgctacgtactactgtcaacagcatctgagggtgccttttacgttcggccaagggaccaaggtggaaatcaaacgg

SEQ ID NO: 455 - DNA, 324 bp, Artificial Sequence
  Chemically synthesized ABT1-141-19
gacatccagatgacccagtctccatcctccctgtctgcatctgtaggagaccgtgtcaccatcacttgccgggcaagtcagtggattcagaagcagttagcgtggtaccagcagaaaccagggaaagcccctaagctcctgatctattcgagttcctggttgcaaagtggggtcccatcacgtttcagtggcagtggatctgggacagatttcactctcaccatcagcagtctgcaacctgaagattttgctacgtactactgtcaacagcatctgagggtgccttttacgttcggccaagggaccaaggtggaaatcaaacgg

SEQ ID NO: 456 - DNA, 324 bp, Artificial Sequence
  Chemically synthesized ABT1-141-20
gacatccagatgacccagtctccatcctccctgtctgcatctgtaggagaccgtgtcaccatcacttgccgggcaagtcagtggattcagaagcagttagcgtggtaccagcagaaaccagggaaagcccctaagctcctgatctattcggcttcctggttgcaaagtggggtcccatcacgtttcagtggcagtggatctgggacagatttcactctcaccatcagcagtctgcaacctgaagattttgctacgtactactgtcaacagcatctgagggtgccttttacgttcggccaagggaccaaggtggaaatcaaacgg

SEQ ID NO: 457 - DNA, 324 bp, Artificial Sequence
  Chemically synthesized ABT1-141-21
gacatccagatgacccagtctccatcctccctgtctgcatctgtaggagaccgtgtcaccatcacttgccgggcaagtcagtggattcagaagcagttagcgtggtatcagcagaaaccagggaaagcccctaagctcctgatctattcttcgtcctatttgcaaagtggggtcccatcacgtttcagtggcagtggatctgggacagatttcactctcaccatcagcagtctgcaacctgaagattttgctacgtactactgtcaacagcagatgtcgtctcctcgtacgttcggccaagggaccaaggtggaaatcaaacgg

SEQ ID NO: 458 - DNA, 324 bp, Artificial Sequence
  Chemically synthesized ABT1-141-22
gacatccagatgacccagtctccatcctccctgtctgcatctgtaggagaccgtgtcaccatcacttgccgggcaagtcagtggattcagaagcagttagcgtggtatcagcagaaaccagggaaagcccctaagctcctgatctattcttcgtcctatttgcaaagtggggtcccatcacgtttcagtggcagtggatctgggacagatttcactctcaccatcagcagtctgcaacctgaagattttgctacgtactactgtcaacagcagatggctcctcctcgtacgttcggccaagggaccaaggtggaaatcaaacgg

SEQ ID NO: 459 - DNA, 324 bp, Artificial Sequence
  Chemically synthesized ABT1-141-23
gacatccagatgacccagtctccatcctccctgtctgcatctgtaggagaccgtgtcaccatcacttgccgggcaagtcagtggattcagaagcagttagcgtggtatcagcagaaaccagggaaagcccctaagctcctgatctattcttcgtcctatttgcaaagtggggtcccatcacgtttcagtggcagtggatctgggacagatttcactctcaccatcagcagtctgcaacctgaagattttgctacgtactactgtcaacagcagatgcagcctcctcgtacgttcggccaagggaccaaggtggaaatcaaacgg

SEQ ID NO: 460 - DNA, 324 bp, Artificial Sequence
  Chemically synthesized ABT1-141-24
gacatccagatgacccagtctccatcctccctgtctgcatctgtaggagaccgtgtcaccatcacttgccgggcaagtcagtggattcagaagcagttagcgtggtatcagcagaaaccagggaaagcccctaagctcctgatctattcttcgtcctatttgcaaagtggggtcccatcacgtttcagtggcagtggatctgggacagatttcactctcaccatcagcagtctgcaacctgaagactttgctacgtactactgtcaacagcatctgagggtgcctccgacgttcggccaagggaccaaggtggaaatcaaacgg

SEQ ID NO: 461 - DNA, 324 bp, Artificial Sequence
  Chemically synthesized ABT1-141-25
gacatccagatgacccagtctccatcctccctgtctgcatctgtaggagaccgtgtcaccatcacttgccgggcaagtcagtggattcagaagcagttagcgtggtatcagcagaaaccagggaaagcccctaagctcctgatctattcttcgtcctatttgcaaagtggggtcccatcacgtttcagtggcagtggatctgggacagatttcactctcaccatcagcagtctgcaacctgaagattttgctacgtactactgtcaacagcatcttcgtgttcctatgacgttcggccaagggaccaaggtggaaatcaaacgg

SEQ ID NO: 462 - DNA, 324 bp, Artificial Sequence
  Chemically synthesized ABT1-141-27
gacatccagatgacccagtctccatcctccctgtctgcatctgtaggagaccgtgtcaccatcacttgccgggcaagtcagtggattcagaagcagttagcgtggtatcagcagaaaccagggaaagcccctaagctcctgatctattcttcgtcctatttgcaaagtggggtcccatcacgtttcagtggcagtggatctgggacagatttcactctcaccatcagcagtctgcaacctgaagattttgctacgtactactgtcaacagggtcttaggcagcctatgactttcggccaagggaccaaggtggaaatcaaacgg

SEQ ID NO: 463 - DNA, 324 bp, Artificial Sequence
  Chemically synthesized ABT1-141-28
gacatccagatgacccagtctccatcctccctgtctgcatctgtaggagaccgtgtcaccatcacttgccgggcaagtcagtggattcagaagcagttagcgtggtatcagcagaaaccagggaaagcccctaagctcctgatctattcttcgtcctatttgcaaagtggggtcccatcacgtttcagtggcagtggatctgggacagatttcactctcaccatcagcagtctgcaacctgaagattttgctacgtactactgtcaacagcatctgagggtgccttttacgctcggccaagggaccaaggtggaaatcaaacgg

SEQ ID NO: 464 - DNA, 324 bp, Artificial Sequence
  Chemically synthesized ABT1-141-29
gacatccaggtgacccagtctccatcctccctgtctgcatctgtaggagaccgtgtcaccatcacttgccgggcaagtcagtggattcagaagcagttagcgtggtatcagctgaaaccagggaaagcccctaagctcctgatctattcttcgtcctatttgcaaagtggggtcccatcacgtttcagtggcagtggatctgggacagatttcactctcaccatcagcagtctgcaacctgaagattttgctacgtactactgtcaacagcatctgagggtgccttttacgttcggccaagggaccaaggtggaaatcaaacgg

SEQ ID NO: 465 - DNA, 324 bp, Artificial Sequence
  Chemically synthesized ABT1-141-30
gacatccaggtgacccagtctccatcctccctgtctgcatctgtaggagaccgtgtcaccatcacttgccgggcaagtcagtggattcagaagcagttagcgtggtatcagcagaaaccagggaaagcccctaagctcctgatctattcttcgtcctatttgcaaagtggggtcccatcacgtttcagtggcagtggatctgggacagatttcactctcaccatcagcagtctgcaacctgaagattttgctacgtactactgtcaacagcatcttcgtgttcctatgacgttcggccaagggaccaaggtggaaatcaaacgg

SEQ ID NO: 466 - DNA, 324 bp, Artificial Sequence
  Chemically synthesized ABT1-141-31
gacatccagatgacccagtctccatcctccctgtctgcatctgtaggagaccgtgtcaccatcacttgccgggcaagtcagtggattcagaagcagttagcgtggtatcagcagaaaccagggaaagcccctaagctcctgatctattcttcgtcctggttgcaaagtggggtcccatcacgtttcagtggcagtggatctgggacagatttcactctcaccatcagcagtctgcaacctgaagattttgctacgtactactgtcaacagcatcttcgtgttcctatgacgttcggccaagggaccaaggtggaaatcaaacgg

SEQ ID NO: 467 - DNA, 324 bp, Artificial Sequence
  Chemically synthesized ABT1-141-32
gacatccagatgacccagtctccatcctccctgtctgcatctgtaggagaccgtatcaccatcacttgccgggcaagtcagtggattcagaagcagttagcgtggtaccagctgaaaccagggaaagcccctaagctcctgatctattcttcgtcctatttgcaaagtggggtcccatcacgtttcagtggcagtggatctgggacagatttcactctcaccatcagcagtctgcaacctgaagattttgctacgtactactgtcaacagcatctgagggtgcctatgacgttcggccaagggaccaaggtggaaatcaaacgg

SEQ ID NO: 468 - DNA, 324 bp, Artificial Sequence
  Chemically synthesized ABT1-141-33
gacatccagatgacccagtctccatcctccctgtctgcatctgtaggagaccgtgtcaccatcacttgccgggcaagtcagtggattcagaagcagttagcgtggtaccagctgaaaccagggaaagcccctaagctcctgatctatagttcttcctggttgcaaagtggggtcccatcacgtttcagtggcagtggatctgggacagatttcactctcaccatcagcagtctgcaacctgaagattttgctacgtactactgtcaacagcatctgagggtgcctatgacgttcggccaagggaccaaggtggaaatcaaacgg

SEQ ID NO: 469 - DNA, 324 bp, Artificial Sequence
  Chemically synthesized ABT1-141-34
gacatccagacgacccagtctccatcctccctgtctgcatctgtaggagaccgtgtcaccatcacttgccgggcaagtcagtggattcagaagcagttagcgtggtatcagcagaaaccagggaaagcccctaagctcctgatctattcttcgtcctatttgcaaagtggggtcccatcacgtttcagtggcagtggatctgggacagatttcactctcaccatcagcagtctgcaacctgaagattttgctacgtactactgtcaacagcatctgagggtgcctatgacgttcggccaagggaccaaggtggaaatcaaacgg

SEQ ID NO: 470 - DNA, 324 bp, Artificial Sequence
  Chemically synthesized ABT1-141-35
gacatccagatgacccagtctccatcctccctgtctgcatctgtaggagaccgtgtcaccatcacttgccgggcaagtcagtggattcagaagcagttagcgtggtatcagcagaaaccagggaaagcccctaagctcctgatctattctgcgtcctggttgcaaagtggggtcccatcacgtttcagtggcagtggatctgggacagatttcactctcaccatcagcagtctgcaacctgaagattttgctacgtactactgtcaacagcatcttcgtgttcctatgacgttcggccaagggaccaaggtggaaatcaaacgg

SEQ ID NO: 471 - DNA, 324 bp, Artificial Sequence
  Chemically synthesized ABT1-141-42
gacctccagatgacccagtctccatcctccctgtctgcatctgtaggagaccgtgtcaccatcacttgccgggcaagtcagtggattcagaagcagttagcgtggtatcagcagaaaccagggaaagcccctaagctcctgatctattcttcgtcctatttgcaaagtggggtcccatcacgtttcagtggcagtggatctgggacagatttcactctcaccatcagcagtctgcaacctgaagattttgctacgtactactgtcaacagcatcttcgtgttcctatgacgttcggccaagggaccaaggtggaaatcaaacgg

SEQ ID NO: 472 - DNA, 324 bp, Artificial Sequence
  Chemically synthesized ABT1-141-43
gacatccagatgacccagtctccatcctccctgtctgcatctgtaggagaccgtgtcaccatcacttgccgggcaagtcagtggattcagaagcagttagcgtggtatcagcagaaaccagggaaagcccctaagctcctgatctattcttcgtcctatttgcaaagtggggtcccaccacgtttcagtggcagtggatctgggacagatttcactctcaccatcagcagtctgcaacctgaagattttgctacgtactactgtcaacagcatcttcgtgttcctatgacgttcggccaagggaccaaggtggaaatcaaacgg

SEQ ID NO: 473 - DNA, 324 bp, Artificial Sequence
  Chemically synthesized ABT1-141-44
gacatccagattacccagtctccatcatccctgtctgcatctgtaggagaccgtgtcaccatcacttgccgggcaagtcagtggattcagaagcagttagcgtggtatcagcagaaaccagggaaagcccctaagctcctgatctattcttcgtcctatttgcaaagtggggtcccatcacgattcagtggcagtggatctgggacagatttcactctcaccatcagcagtctgcaacctgaagattttgctacgtactactgtcaacagcatcttcgtgttcctatgacgttcggccaagggaccaaggtggaaatcaaacgg

SEQ ID NO: 474 - DNA, 324 bp, Artificial Sequence
  Chemically synthesized ABT1-141-45
gacatccagatgacccagtctccatcctccctgtctgcatctgtaggagaccgtgtcaccatcacttgccgggcaagtcagtggattcagaagcagttagcgtggtatcagcagaaaccagggaaagcccctaagctcctgatctattcttcgtcctatttgcaaagtggggtcccatcacgtttcagtggcagcggatctgggacagatttcactctcaccatcagtagtctgcaacttgaagattttgctacgtactactgtcaacagcatcttcgtgttcctatgacgctcggccaagggaccaaggtggaaatcaaacgg

SEQ ID NO: 475 - DNA, 324 bp, Artificial Sequence
  Chemically synthesized ABT1-141-46
gacatccagatgacccagtctccatcctccctgtctgcatctgtaggagaccgtgtcaccatcacttgccgggcaagtcagtggattcagaagcagttagcgtggtatcagcagaaaccagggaaagcccctaagctcctgatctattcttcgtcccatttgcaaagtggggtcccatcacgtttcagtggcagtggatctgggacagatttcactctcaccatcagcagtctgcaacctgaagattttgctacgtactactgtcaacagcatcttcgtgttcctatgacgttcggccaagggaccaaggtggtaatcaaacgg

SEQ ID NO: 476 - DNA, 324 bp, Artificial Sequence
  Chemically synthesized ABT1-141-47
gacatccagatgacccagtctccatcctccctgtctgcatctgtaggagaccgtgtcaccatcacttgccgggcaaatcagtggattcagaagcagttagcgtggtatcagcagaaaccggggaaagcccctaagctcctgatctattcttcgtcccatttgcaaagtggggtcccatcacgtttcagtggcagtggatctgggacagatttcactctcaccatcagcagtctgcaacctcaagattttgctacgtactactgtcaacagcatcttcgtgttcctatgacgttcggccaagggaccaaggtggaaatcaaacgg

SEQ ID NO: 477 - DNA, 324 bp, Artificial Sequence
  Chemically synthesized ABT1-141-48
gacatccagatgacccagtctccatcctccctgtctgcatctgtaggagaccgtgtcaccatcacttgccgggcaagtcagtggattcagaagcagttagcgtggtatcagcagaaaccagggaaagcccctaagctcctgatcttttcttcgtcccatttgcaaagtggggtcccatcacgtttcagtggcagtggatctgggacagatttcactctcaccatcagcagtctgcaacctgaagattttgcttcgtactactgtcaacagcatcttcgtgttcctatgacgttcggccaagggaccaaggtggaaatcaaacgg

SEQ ID NO: 478 - DNA, 324 bp, Artificial Sequence
  Chemically synthesized ABT1-141-49
gacatccagatgacccagtctccatcctccctgtctgcatctgtaggagaccgtgtcaccatcacttgccgggcaagtcagtggattcagaagcagttagcgtggtatcagctgaaaccagggaaagcccctaagctcctgatctattcttcgtcccattcgcaaagtggggtcccatcacgtttcagtggcagtggatctgggacagatttcactctcaccatcagcagtctgcaacctgaagattttgctacgtactactgtcaacagcatcttcgtgttcctatgacgttcggccaagggaccaaggtggaaatcaaacgg

SEQ ID NO: 479 - DNA, 324 bp, Artificial Sequence
  Chemically synthesized ABT1-141-50
gacatccagatgacccagtctccatcctccctgtctgcatctgtaggagaccgtgtcaccatcacttgccgggcaagtcagtggattcagaagcagttagcgtggtatcagcagaaaccagggaaaacccctaagctcctgatctattcttcgtcctatttgcaaagtggggtcccatcacgtttcagtggcagtggatctgggacagatttcactctcaccatcagcagtctgcaacctgaagattttgctacgtactactgtcaacagcatcttcgtgttcctatgacgttcggccaagggaccaatgtggaaatcaaacgg

SEQ ID NO: 480 - DNA, 324 bp, Artificial Sequence
  Chemically synthesized ABT1-141-51
gacatccagatgacccagtctccatcctccctgtctgcatctgtaggagaccgtgtcaccatcacttgccgggcaagtcagtggattcagaagcagttagcgtggtatcagcagaaaccagggaaagtccctaagctcctgatctattcttcgtcctatttgcaaagtggggtcccatcacgtttcagtggcagtggatctgggacagatttcactctcaccatcagcagtctgcaacctgaagattttgctacgtactactgtcaacagcatcttcgtgttcctatgacgttcggccaagggaccaaggtggtaatcaaacgg

SEQ ID NO: 481 - DNA, 324 bp, Artificial Sequence
  Chemically synthesized ABT1-141-52
gacatccagatgacccagtctccatcctccctgtctgcatctgtaggagaccgtgtcaccatcacttgccgggcaaatcagtggattcagaagcagttagcgtggtatcagcagaaaccagggaaagcccctaagctcctgatctattcttcgtcctatttgcaaagtggggtcccatcacgtttcagtggcagtggatctgggacagatttcactctcaccatcagcagtctgcaacctgaagattttgctacgtactactgtcaacagcatcttcgtgttcctatgacgctcggccaagggaccaaggtggaaatcaaacgg

SEQ ID NO: 482 - DNA, 324 bp, Artificial Sequence
  Chemically synthesized ABT1-141-53
gacatccagatgacccagtctccatcctccctgtctgcatctgtaggagaccgtgtcaccatcacttgccgggcaagtcagtggattcagaagcagttagcgtggtatcagctgaaaccagggaaaacccctaagctcctgatcttttcttcgtcctatttgcaaagtggggtcccatcacgtttcagtggcagtggatctgggacagatttcactctcaccatcagcagtctgcaacctgaagattttgctacgtactactgtcaacagcatcttcgtgttcctatgacgttcggccaagggaccaaggtggaaatcaaacgg

SEQ ID NO: 483 - DNA, 324 bp, Artificial Sequence
  Chemically synthesized ABT1-141-54
gacatccagatgacccagtctccatcctccctgtctgcatctgtaggagaccgtgtcaccatcacttgccgggcaagtcagtggattcagaagcagttagcgtggtatcagcagaaaccagggaaagcccctaagctcctgatctattcttcgtcccatttgcaaagtggggtcccatcacgtttcagtggcagtggatctgggacagatttcactctcaccatcagcagtctgcaacctgaagattttgctacgtactactgtcaacagcatcttcgtgttcctatgacgtttggccaagggaccaaggtggaaatcaaacgg

SEQ ID NO: 484 - DNA, 324 bp, Artificial Sequence
  Chemically synthesized ABT1-141-70
gacatccagatgacccagtctccatcctccctgtctgcatctgtaggagaccgtgtcaccatcacttgccgggcaagtcagtggattcagaagcagttagcgtggtatcagcagaaaccagggaaagcccctaagctcctgatctattcttcgtcccatttgcaaagtggggtcccatcacgtttcagtggcagtggatatgggacagatttcactctcaccatcagcagtctgcaaccagaagattttgctacgtactactgtcaacagcatcttcgtgttcctatgacgttcggccaagggaccaaggtggaaatcaaacgg

SEQ ID NO: 485 - DNA, 324 bp, Artificial Sequence
  Chemically synthesized ABT1-141-75
gacatccagatgacccagtctccatcctccctgtctgcatctgtaggagaccgtgtcaccatcacttgccgggcaaatcagtggattcagaagcagttagcgtggtatcagcagaaaccagggaaagcccctaagctcctgatctattcttcgtcctatttgcaaagtggggtcccatcacgtttcagtggcagtggatctgggacagatttcactctcaccatcagcagtctgcaacctgaagattttgctacgtactactgtcaacagcatcttcgtgttcctatgacgttcggccaagggaccaaggtggaaatcaaacgg

SEQ ID NO: 486 - DNA, 324 bp, Artificial Sequence
  Chemically synthesized ABT1-141-76
gacatccagatgacccagtctccatcctccctgtctgcatctgtaggagaccgtgtcaccatcacttgccgggcaaatcagtggattcagaagcagttagcgtggtatcagcagaaaccggggaaagcccctaagctcctgatctattcttcgtcccatttgcaaagtggggtcccatcacgtttcagtggcagtggatctgggacagatttcactctcaccatcagcagtctgcaacctgaagattttgctacgtactactgtcaacagcatcttcgtgttcctatgacgttcggccaagggaccaaggtggaaatcaaacgg

SEQ ID NO: 487 - DNA, 324 bp, Artificial Sequence
  Chemically synthesized ABT1-141-77
gacatccagatgacccagtctccatcctccctgtctgcatctgtaggagaccgtgtcaccatcacttgccgggcaaatcagtggattcagaagcagttagcgtggtatcagcagaaaccggggaaagcccctaagctcctgatcttctcttcgtcccatttgcaaagtggggtcccatcacgtttcagtggcagtggatctgggacagatttcactctcaccatcagcagtctgcaacctcaagattttgctacgtactactgtcaacagcatcttcgtgttcctatgacgttcggccaagggaccaaggtggaaatcaaacgg

SEQ ID NO: 488 - DNA, 324 bp, Artificial Sequence
  Chemically synthesized ABT1-141-78
gacatccagatgacccagtctccatcctccctgtctgcatctgtaggagaccgtgtcaccatcacttgccgggcaaatcagtggattcagaagcagttagcgtggtatcagcagaaaccggggaaagcccctaagctcctgatctattcttcgtcccatttgcaaagtggggtcccatcacgtttcagtggcagtggatacgggacagatttcactctcaccatcagcagtctgcaacctcaagattttgctacgtactactgtcaacagcatcttcgtgttcctatgacgttcggccaagggaccaaggtggaaatcaaacgg

SEQ ID NO: 489 - DNA, 324 bp, Artificial Sequence
  Chemically synthesized ABT1-141-79
gacatccagatgacccagtctccatcctccctgtctgcatctgtaggagaccgtgtcaccatcacttgccgggcaaatcagtggattcagaagcagttagcgtggtatcagcagaaaccggggaaagcccctaagctcctgatcttctcttcgtcccatttgcaaagtggggtcccatcacgtttcagtggcagtggatctgggacagatttcactctcaccatcagcagtctgcaacctgaagattttgctacgtactactgtcaacagcatcttcgtgttcctatgacgttcggccaagggaccaaggtggaaatcaaacgg

SEQ ID NO: 490 - DNA, 324 bp, Artificial Sequence
  Chemically synthesized ABT1-141-80
gacatccagatgacccagtctccatcctccctgtctgcatctgtaggagaccgtgtcaccatcacttgccgggcaaatcagtggattcagaagcagttagcgtggtatcagcagaaaccggggaaagcccctaagctcctgatctattcttcgtcccatttgcaaagtggggtcccatcacgtttcagtggcagtggatacgggacagatttcactctcaccattagcagtctgcaacctgaagattttgctacgtactactgtcaacagcatcttcgtgttcctatgacgttcggccaagggaccaaggtggaaatcaaacgg

SEQ ID NO: 491 - DNA, 324 bp, Artificial Sequence
  Chemically synthesized ABT1-141-500
gacatccagatgacccagtatccatcctccctgtctgcatctgtaggagaccgtgtcaccatcacttgccgggcaagtcagtggattcagaagcagctagcgtggtatcagcagaaaccagggaaagcccctaagctcctgatctattcttcgtcctatttgcaaagtggggtcccatcacgtttcagtggcagtggatctgggacagatttcactctcaccatcagcagtctgcggcctgaagattttgctacgtactactgtcaacagcatctgagggtgccttttacgttcggccaagggaccaaggtggaaatcaaacgg

SEQ ID NO: 492 - DNA, 324 bp, Artificial Sequence
  Chemically synthesized ABT1-141-501
gacatcttgatgacccagtctccatcctccctgtctgcatctgtaggagaccgtgtcaccatcacttgccgggcaagtcagtggattcagaagcagttagcgtggtatcagcagaaaccagggaaagcccctaagctcctgatctactccgcctccacgttgcaaagtggggtcccatcacgtttcagtggcagtggatctgggacagatttcactctcaccatcagcagtctgcaacctgaagattttgctacgtactactgtcaacagtggctgtctattcctcatacgttcggccaagggaccaaggtgggaatcaaacgg

SEQ ID NO: 493 - DNA, 324 bp, Artificial Sequence
  Chemically synthesized ABT1-141-502
gacatccaggtgacccagtctccatcctccctgtctgcatctgtaggagaccgtgtcaccatcacttgccgggcaagtcagtggattcagaagcagttagcgtggtaccagcagaaaccagggaaagcccccaggctcctgatctatgctgcgtccgctttgcgaagtggggtcccatcacgtttcagtggcagtggatctgggacagatttcactctcaccatcagcagtctgcaacctgaagattttgccacgtactactgtcaacagactttgaggagcccttttacgttcggccaagggaccaaggtggaaatcaaacgg

SEQ ID NO: 494 - DNA, 324 bp, Artificial Sequence
  Chemically synthesized ABT1-141-503
gacatccagatgacccagtccccatcctccctgtctgcatctgtaggaggccgtgtcaccatcacttgccgggcaagtcagtggattcagaagcagttagcgtggtatcagcagaaaccagggaaagcccccaagctcctggtctatgcggcttcctggttgcaaagtggggtcccatcacgtttcagtggcagtggatctgggacagatttcactctcaccatcagcagtctgcaacctgaagattttgctacgtactactgtcaacagagtctgagggcgccttttacgttcggccaagggaccaaggtggaaatcaaacgg

SEQ ID NO: 495 - DNA, 324 bp, Artificial Sequence
  Chemically synthesized ABT1-141-504
gacatccagatgacccagtctccatcctccctgtctgcatctgtaggagaccgtgtcaccatcacttgccgggcaagtcagtggattcagaagcagttagcgtggtatcagcagaaaccagggggagcccctaagctcctgatctattcttcgtcctatttgcaaagtggggtcccatcacgtttcagtggcagtggatctgggacagatttcactctcaccatcagcagtctgcaacctgaagattttgctacgtactactgtcaacagaatctgtcggttccttttacgttcggccaagggaccaaggtggaaatcaaacgg

SEQ ID NO: 496 - DNA, 324 bp, Artificial Sequence
  Chemically synthesized ABT1-141-505
gacatccagatgacccagtctccatcctccctgtctgcatctgtaggagaccgtgtcaccatcacttgccgggcaagtcagtggattcagaagcagttagcgtggtatcagcagaaaccagggaaagcccctaagctcctgatctattcttcgtcctatttgcaaagtggggtcccatcacgtttcagtggcagtggatctgggacagatttcactctcaccatcagcagtctgcaacctgaagattttgctacgtactactgtcaacagaatctgtcggttccttttacgttcggccaagggaccaaggtggaaatcaaacgg

SEQ ID NO: 497 - DNA, 324 bp, Artificial Sequence
  Chemically synthesized ABT1-141-506
gacatccagatgacccagtccccatcctccctgtctgcatctgtaggagaccgtgtcaccatcacttgccgggcaagtcagtggattcagaagcagttagcgtggtatcagcagaagccagggagagcccctaggctcctgatctattcttcgtcctatttgcaaagcggggtcccatcacgtttcagtggcagtggatctgggacagatttcactctcaccatcagcagtctgcaacctgaagattttgctacgtactactgtcaacagaatctgtcggttccttttacgttcggccaagggaccaaggtggaaatcaaacgg

SEQ ID NO: 498 - DNA, 324 bp, Artificial Sequence
  Chemically synthesized ABT1-141-507
gatattcagatgacccagagcccgagcagcctgagcaccagcgtgggcgatcgtgtgaccattacctgccgtgcgagcctgtggattcagaaacagctggcgtggtatcagcagaaaccgggcaaagcgccgaaactgctgatttatgcgggcagctttctgcagagcggcgtgccgagccgttttagcggcagcggcagcggcaccgattttgcgctgaccattagcagcctgcagccggaagattttgcgacctattattgccagcagaccctgttttatccgtttacctttggccagggcaccaaagtggaaattaaacgt

SEQ ID NO: 499 - DNA, 324 bp, Artificial Sequence
  Chemically synthesized ABT1-141-508
gatattcagatgacccagagcccgagcagcctgagcgcgagcgtgggcgatcgtgtgaccattacctgccgtgcgagccagtggattcagaaacagctggcgtggtatcagcagaaaccgggccgtgcgccgaaactgctgatttatagcagcagctatctgcagagcggcgtgccgagccgttttagcggcagcggcagcggcaccgattttaccctgaccattagcagcctgcagccggaagattttgcggcgtattattgccagcagcatctgcgtgtgccgaacacctttagccagggcaccaaagtggaagtgaaacgt

SEQ ID NO: 500 - DNA, 324 bp, Artificial Sequence
  Chemically synthesized ABT1-141-509
gatattcagatgacccagagcccgagcagcctgagcgcgagcgtgggcgatcgtgtgaccattacctgccgtgcgaaccagtggattcagaaacagctggcgtggtatcagcagaaaccgggcaaagcgctgaaactgctggtgtatagcgcgagctatctgcagagcggcgtgccgagccgttttagcggcagcggcagcggcaccgattttaccctgaccattagcagcctgcagccggaagattttgcgacctattattgccagcagcatctgcgtgtgccgtttacctttggccagggcaccaaagtggaaattaaacgt

SEQ ID NO: 501 - DNA, 324 bp, Artificial Sequence
  Chemically synthesized ABT1-141-510
gatattcagatgacccagagcccgagcagcctgagcgcgagcgtgggcgatcgtgtgaccattacctgccgtgcgagccagtggattcagaaacagctggcgtggtatcagcagaaaccgggcaaagcgccgaaactgctggtgtatgcggcgagctggctgcagagcggcgtgccgagccgttttagcggcagcggcagcggcaccgattttaccctgaccattagcagcctgcagccggaagattttgcgacctattattgccagcagagcctgcgtgcgccgtttacctttggccagggcaccaaagtggaaattaaacgt

SEQ ID NO: 502 - DNA, 324 bp, Artificial Sequence
  Chemically synthesized ABT1-141-511
gatattcagatgacccagagcccgagcagcctgagcgcgagcgtgggcgatcgtgtgaccattacctgccgtgcgagccagtggattcagaaacagctggcgtggtatcagcagaaaccgggcaaaaccccgaaactgctgatttatagcagcagctatctgcagagcggcattccgagccgttttagcggcagcggcagcggcaccgattttaccctgaccattagcagcctgcagccggaagattttgcgacctattattgccagcagcatctgcgtgtgccgtttacctttggccagggcaccaaagtggaaattaaacgt

SEQ ID NO: 503 - DNA, 324 bp, Artificial Sequence
  Chemically synthesized ABT1-141-512
gatattcagatgacccagagcccgagcagcctgagcgcgagcgtgggcgatcgtgtgaccattacctgccgtgcgagccagtggattcagaaacagctggcgtggtatcagcagaaaccgggcaaagtgccgaaactgctgatttatagcagcagctatctgcagagcggcgtgccgagccgttttaacggcagcggcagcggcaccgattttaccctgaccattagcagcctgcagccggaagattttgcgacctattattgccagcagaccctgaccgtgccgtttacctttggccagggcaccaaagtggaaattaaacgt

SEQ ID NO: 504 - DNA, 324 bp, Artificial Sequence
  Chemically synthesized ABT1-141-513
gatattcaggtgacccagagcccgagcagcctgagcgcgagcgtgggcgatcgtgtgaccattacctgccgtgcgagccagtggattcagaaacagctggcgtggtatcagcagaaaccgggcaaagcgccgcgtctgctgatttatgcggcgagcgcgctgcagagcggcgtgccgagccgttttagcggcggcggcagcggcaccgattttaccctgaccattagcggcctgcagccggaagattttgcgacctattattgccagcagaccctgcgtagcccgtttacctttggccagggcaccaaagtggaaattaaacgt

SEQ ID NO: 505 - DNA, 324 bp, Artificial Sequence; identical to SEQ ID NO: 450
  Chemically synthesized ABT1-141-514

SEQ ID NO: 506 - DNA, 324 bp, Artificial Sequence
  Chemically synthesized ABT1-141-516
gacatccagatgacccagtctccatcctccctgtctgcatctgtaggagaccgtgtcaccatcaattgccgggcaaatcagtggattcagaagcagttagcgtggtaccagcagaaaccagggaaggcccttaagctcctggtctatagtgcgtcctatctgcaaagtggggtcccatcacgtttcagtggcagtggatctgggtcagatttcactctcaccatcagcagtctgcaacctgaagattttgctacgtactactgtcaacagcatctgagggtgccttttacgttcggccaagggaccaaggtggaaatcaaacgg

SEQ ID NO: 507 - DNA, 324 bp, Artificial Sequence
  Chemically synthesized ABT1-141-519
gacatccagatgacccagtctccatcctccctgtctgcatctgtaggagaccgtgtcaccttcacttgccgggcaagtcagtggattcagaagcagttagcgtggtaccagcagaaaccagggaaagtccctaagctcctgatctattcttcgtcctatttgcaaagtggggtcccatcacgtttcagtggcagtggatctgggacagatttcactctcaccatcagcagtctgcaacctgaagattttgctacgtacttctgtcaacagactttgactgtgccttttacgttcggccaagggaccaaggtggaaatcaaacgg

SEQ ID NO: 508 - DNA, 324 bp, Artificial Sequence
  Chemically synthesized ABT1-141-520
gacatccagatgacccagtctccatcctccctgtctgcatctgtaggagaccgtgtcaccatcaattgccgggcaaatcagtggattcagaagcagttagcgtggtaccagcagaaaccagggaaggcccttaagctcctggtctatagtgcgtcctatctgcaaagtggggtcccatcaaggttcagtggcagtggatctgggacagatttcactctcaccatcagcagtctgcaacctgaagattttgctacgtactactgtcaacagcatcttcgtgttcctatgacgttcggccaagggaccaaggtggaaatcaaacgg

SEQ ID NO: 509 - DNA, 324 bp, Artificial Sequence
  Chemically synthesized ABT1-141-521
gacatccagatgacccagtctccatcctccctgtctgcatctgtaggagaccgtgtcaccatcacttgccgggcaagtcagtggattcagaagcagttagcgtggtatcagcagaaaccagggaaagcccctaagctcctgatctattcgtcgtcctggttgcaaagtggggtcccatcacgtttcagtggcagtggatctgggacagatttcactctcaccatcagcagtctgcaacctgaagattttgctacgtactactgtcaacagcatcttcgtgttcctatgacgttcggccaagggaccaaggtggaaatcaaacgg

SEQ ID NO: 510 - DNA, 324 bp, Artificial Sequence
  Chemically synthesized ABT1-141-522
gacatccagatgacccagtctccatcctccctgtctgcatctgtaggagaccgtgtcaccatcacttgccgggcaagtcagtggattcagaagcagttagcgtggtatcagcagaaaccagggaaagcccctaagctcctgatctattcgtcgtcctggtggcaaagtggggtcccatcacgtttcagtggcagtggatctgggacagatttcactctcaccatcagcagtctgcaacctgaagattttgctacgtactactgtcaacagcatcttcgtgttcctatgacgttcggccaagggaccaaggtggaaatcaaacgg

SEQ ID NO: 511 - DNA, 324 bp, Artificial Sequence; identical to SEQ ID NO: 509
  Chemically synthesized ABT1-141-523

SEQ ID NO: 512 - DNA, 324 bp, Artificial Sequence
  Chemically synthesized ABT1-141-524
gacatccagatgacccagtctccatcctccctgtctgcatctgtaggagaccgtgtcaccatcacttgccgggcaagtcagtggattcagaagcagttagcgtggtatcagcagaaaccagggaaagcccctaagctcctgatctattcctcgtcctggttgcaaaggggggtcccatcacgtttcagtggcagtggatctgggacagatttcactctcaccatcagcagtctgcaacctgaagattttgctacgtactactgtcaacagcatcttcgtgttcctatgacgttcggccaagggaccaaggtggaaatcaaacgg

SEQ ID NO: 513 - DNA, 324 bp, Artificial Sequence
  Chemically synthesized ABT1-141-525
gacatccagatgacccagtctccatcctccctgtctgcatctgtaggagaccgtgtcaccatcacttgccgggcaagtcagtggattcagaagcagttagcgtggtatcagcagaaaccagggaaagcccctaagctcctgatctattcctcgtcctggttgcaaagtggggccccatcacgtttcagtggcagtggatctgggacagatttcactctcaccatcagcagtctgcaacctgaagattttgctacgtactactgtcaacagcatcttcgtgttcctatgacgttcggccaagggaccaaggtggaaatcaaacgg

SEQ ID NO: 514 - DNA, 324 bp, Artificial Sequence
  Chemically synthesized ABT1-141-526
gacatccagatgacccagtctccatcctccctgtctgcatctgtaggagaccgtgtcgccatcacttgccgggcaagtcagtggattcagaagcagttagcgtggtatcagcagaaaccagggaaagcccctaagctcctgatctattcttcgtcctatttgcaaagtggggtcccatcacgtttcagtggcagtggatctgggacagatttcactctcaccatcagcagtctgcaacctgaagattttgctacgtactactgtcaacagcatcttcgtgttcctatgacgttcggccaagggaccaaggtggaaatcaaacgg

SEQ ID NO: 515 - DNA, 324 bp, Artificial Sequence
  Chemically synthesized ABT1-141-527
gacatccagatgacccagtctccatcctccctgtctgcatctgtaggagaccgtgtcaccatcacttgccgggcaagtcagtggattcagaagcagttagcgtggtatcagcagaaaccagggaaagcccctaagctcctgatctattcttcgtcctatttgcaaagtggggtcccatcacgtctcagtggcagtggatctgggacagatttcactctcaccatcagcagtctgcaacctgaagattttgctacgtactactgtcaacagcatcttcgtgttcctatgacgttcggccaagggaccaaggtggaaatcaaacgg

SEQ ID NO: 516 - DNA, 324 bp, Artificial Sequence
  Chemically synthesized ABT1-141-528
gacatccagatgacccagtctccatcctccctgtctgcatctgtaggagaccgtgtcaccatcacttgccgggcaagtcagtggattcagaagcagttagcgtggtatcagcagaaaccagggaaagcccctaagctcctgatctattcttcgatgcataagcaaagtggggtcccatcacgtttcagtggcagtggatctgggacagatttcactctcaccatcagcagtctgcaacctgaagattttgctacgtactactgtcaacagcatcttcgtgttcctatgacgttcggccaagggaccaaggtggaaatcaaacgg

SEQ ID NO: 517 - DNA, 324 bp, Artificial Sequence
  Chemically synthesized ABT1-141-529
gacatccagatgacccagtctccatcctccctgtctgcatctgtaggagaccgtgtcaccatcacttgccgggcaaaccagtggattcagaagcagttagcgtggtatcagcagaaaccagggaaagcccctaagctcctgatctatagctcgtccacgttgcaaagtgggaccccatcacgtttcagtggcagtggatctgggacagatttcactctcaccatcagcagtctgcaacctgaagattttgctacgtactactgtcaacagcatcttcgtgttcctatgacgctcggccaagggaccaaggtggaaatcaaacgg

SEQ ID NO: 518 - DNA, 324 bp, Artificial Sequence
  Chemically synthesized ABT1-141-530
aacatccagatgacccagtctccatcctccctgtctgcatctgtaggagaccgtgtcaccatcacttgccgggcatcggagtggattcagaagcagttagcgtggtatcagcagaaaccagggaaagcccctaagctcctgatctatagctcgtcctggttgcaaagtggggtcccatcacgtttcagtggcagtggatctgggacagatttcactctcaccatcagcagtctgcaacctgaagattttgctacgtactactgtcaacagcatcttcgtgttcctatgacgttcggccaagggaccaaggtggaaatcaaacgg

SEQ ID NO: 519 - DNA, 324 bp, Artificial Sequence
  Chemically synthesized ABT1-141-531
gacatccagatgacccagtctccatcctccctgtctgcatctgtaggagaccgtgtcaccatcacttgccgggcagaccagtggattcagaagcagttagcgtggtatcagcagaaaccagggaaagcccctaagctcctgatctatagctcgtcctggttgcaaagtggggtcccatcacgtttcagtggcagtggatctgggacagatttcactctcaccatcagcagtctgcaacctgaagattttgctacgtactactgtcaacagcatcttcgtgttcctatgacgttcggccaagggaccaaggtggaaatcaaacgg

SEQ ID NO: 520 - DNA, 324 bp, Artificial Sequence
  Chemically synthesized ABT1-141-532
gacatccaggtgacccagtctccatcctccctgtctgcatctgtaggagaccgtgtcaccatcacttgccgggcagaccagtggattcagaagcagttagcgtggtatcagcagaaaccagggaaagcccctaagctcctgatctatagctcgtcctggttgcaaagtggggtcccatcacgtttcagtggcagtggatctgggacagatttcactctcaccatcagcagtctgcaacctgaagattttgctacgtactactgtcaacagcatcttcgtgttcctatgacgttcggccaagggaccaaggtggaaatcaaacgg

SEQ ID NO: 521 - DNA, 324 bp, Artificial Sequence
  Chemically synthesized ABT1-141-533
gacatccagatgacccagtctccatcctccctgtctgcatctgtaggagaccgtgtcaccatcacttgccggacgaaccagtggattcagaagcagttagcgtggtatcagcagaaaccagggaaagcccctaagctcctgatctattcttcgtcccataaccaaagtggggtcccatcacgtttcagtggcagtggatctgggacagatttcactctcaccatcagcagtctgcaacctgaagattttgctacgtactactgtcaacagcatcttcgtgttcctatgacgttcggccaagggaccaaggtggaaatcaaacgg

SEQ ID NO: 522 - DNA, 324 bp, Artificial Sequence
  Chemically synthesized ABT1-141-534
gacatccagatgacccagtctccatcctccctgtctgcatctgtaggagaccgtgtcaccatcacttgccgggcaagtcagtggattcagaagcagttagcgtggtatcagcagaaaccagggaaagcccctaagctcctgatctattcttcgaaccatccgcaaagtggggtcccatcacgtttcagtggcagtggatctgggacagatttcactctcaccatcagcagtctgcaacctgaagattttgctacgtactactgtcaacagcatcttcgtgttcctatgacgttcggccaagggaccaaggtggaagtcaaacgg

SEQ ID NO: 523 - DNA, 324 bp, Artificial Sequence
  Chemically synthesized ABT1-141-535
gacatccagatgacccagtctccatcctccctgtctgcatctgtaggagaccgtgtcaccatcacttgccgggcaagtcagtggattcagaagcagttagcgtggtatcagcagaaaccagggaaagcccctaagctcctgatctattcttcggcgcatgcgcaaagtggggtcccatcacgtttcagtggcagtggatctgggacagatttcactctcaccatcagcagtctgcaacctgaagattttgctacgtactactgtcaacagcatcttcgtgttcctatgacgttcggccaagggaccaaggtggaaatcaaacgg

SEQ ID NO: 524 - DNA, 324 bp, Artificial Sequence
  Chemically synthesized ABT1-141-536
gacatccagatgacccagtctccatcctccctgtctgcatctgtaggagaccgtgtcaccatcacttgccgggcaagtcagtggattcagaagcagttagcgtggtatcagcagaaaccagggaaagcccctaagctcctgatctattcttcggcccatttgcaaagtggggtcccatcacgtttcagtggcagtggatctgggacagatttcactctcaccatcagcagtctgcaacctgaagattttgctacgtactactgtcaacagcatcttcgtgttcctatgacgttcggccaagggaccaaggtggaaatcaaacgg

SEQ ID NO: 525 - DNA, 324 bp, Artificial Sequence
  Chemically synthesized ABT1-141-537
gacatccagatgacccagtctccatcctccctgtctgcatctgtaggagaccgtgtcaccatcacttgccgggcaagtcagtggattcagaagcagttagcgtggtatcagcagaaaccagggaaagcccctaagctcctgatctattcttcgatgcatacccaaagtggggtcccatcacgtttcagtggcagtggatctgggacagatttcactctcaccatcagcagtctgcaacctgaagattttgctacgtactactgtcaacagcatcttcgtgttcctatgacgttcggccaagggaccaaggtggaaatcaaacgg

SEQ ID NO: 526 - DNA, 324 bp, Artificial Sequence
  Chemically synthesized ABT1-141-538
gacatccagatgacccagtctccatcctccctgtctgcatctgtaggagaccgtgtcaccatcacttgccgggcaagtcagtggattcagaagcagttagcgtggtatcagcagaaaccagggaaagcccctaagctcctgatctattcttcgaaccattcccaaagtggggtcccatcacgtttcagtggcagtggatctgggacagatttcactctcaccatcagcagtctgcaacctgaagattttgctacgtactactgtcaacagcatcttcgtgttcctatgacgttcggccaagggaccaaggtggaaatcaaacgg

SEQ ID NO: 527 - DNA, 324 bp, Artificial Sequence
  Chemically synthesized ABT1-141-539
gacatccagatgacccagtctccatcctccctgtctgcatctgtaggagaccgtgtcaccatcacttgccgggcgaacgagtggattcagaagcagttagcgtggtatcagcagaaaccagggaaagcccctaagctcctgatctattcttcgatgcatccccaaagtggggtcccatcacgtttcagtggcagtggatctgggacagatttcactctcaccatcagcagtctgcaacctgaagattttgctacgtactactgtcaacagcatcttcgtgttcctatgacgttcggccaagggaccaaggtggaaatcaaacgg

SEQ ID NO: 528 - DNA, 324 bp, Artificial Sequence
  Chemically synthesized ABT1-141-541
gacatccagatgacccagtctccatcctccctgtctgcatctgtaggagaccgtgtcaccatcacttgccgggcaagtcagtggattcagaagcagttagcgtggtatcagcagaaaccagggaaagcccctaagctcctgatctattcttcgatgcatccgcaaagtggggtcccatcacgtttcagtggcagtggatctgggacagatttcactctcaccatcagcagtctgcaacctgaagattttgctacgtactactgtcaacagcatcttcgtgttcctatgacgttcggccaagggaccaaggtggaaatcaaacgg

SEQ ID NO: 529 - DNA, 324 bp, Artificial Sequence
  Chemically synthesized ABT1-141-542
gacatccagatgacccagtctccatcctccctgtctgcatctgtaggagaccgtgtcaccatcacttgccgggcaagtcagtggattcagaagcagttagcgtggtatcagcagaaaccagggaaagcccctaagctcctgatctattcttcgatgcattcccaaagtggggtcccatcacgtttcagtggcagtggatctgggacagatttcactctcaccatcagcagtctgcaacctgaagattttgctacgtactactgtcaacagcatcttcgtgttcctatgacgttcggccaagggaccaaggtggaaatcaaacgg

SEQ ID NO: 530 - DNA, 324 bp, Artificial Sequence
  Chemically synthesized ABT1-141-543
gacatccagatgacccagtctccatcctccctgtctgcatctgtaggagaccgtgtcaccatcacttgccggtcgaacgagtggattcagaagcagttagcgtggtatcagcagaaaccagggaaagcccctaagctcctgatctattcttcgacccatcggcaaagtggggtcccatcacgtttcagtggcagtggatctgggacagatttcactctcaccatcagcagtctgcaacctgaagattttgctacgtactactgtcaacagcatcttcgtgttcctatgacgttcggccaagggaccaaggtggaaatcaaacgg

SEQ ID NO: 531 - DNA, 324 bp, Artificial Sequence
  Chemically synthesized ABT1-141-544
gacatccagatgacccagtctccatcctccctttctgcatctgtaggagaccgtgtcaccatcacttgccgggcaagtcagtggattcagaagcagttagcgtggtatcagctgaaaccagggaaagcccctaagctcctgatctattcttcgtcatatttgcaaagtggggtcccatcacgtttcagtggcagtggatctgggacagatttcactctcaccatcagcagtctgcaacctgaagattttgctacgtactactgtcaacagcatcttcgtgttcctatgacgttcggccaagggaccaaggtggaaatcaaacgg

SEQ ID NO: 532 - DNA, 324 bp, Artificial Sequence
  Chemically synthesized ABT1-141-545
gacatccagatgacccagtctccatcctccctgtctgcatctgtaggagaccgtgtcaccatcacttgccgggcaaaccagtggattcagaagcagttagcgtggtatcagcagaaaccagggaaagcccctaagctcctgatctattcttcgtcctatttgcaaagtggggtcccatcacgtttcagtggcagtggatctgggacagatttcactctcaccatcagcagtctgcaacctgaagattttgctacgtactactgtcaacagcatcttcgtgttcctatgacgttcggccaagggaccaaggtggaaatcaaacgg

SEQ ID NO: 533 - DNA, 324 bp, Artificial Sequence
  Chemically synthesized ABT1-141-546
gacatccagatgacccagtctccatcctccctgtctgcatctgtaggagaccgtgtcaccatcacttgccgggcatcggagtggattcagaagcagttagcgtggtatcagcagaaaccagggaaagcccctaagctcctgatctattcgtcgtcctggttgcaaagtggggtcccatcacgtttcagtggcagtggatctgggacagatttcactctcaccatcagcagtctgcaacctgaagattttgctacgtactactgtcaacagcatcttcgtgttcctatgacgttcggccaagggaccaaggtggaaatcaaacgg

SEQ ID NO: 534 - DNA, 324 bp, Artificial Sequence
  Chemically synthesized ABT1-141-547
gacatccagatgacccagtctccatcctccctgtctgcatctgtaggagaccgtgtcaccatcacttgccgggcaaactcgtggattcagaagcagttagcgtggtatcagcagaaaccagggaaagcccctaagctcctgatctattcttcgtcctatttgcaaagtggggtcccatcacgtctcagtggcagtggatctgggacagatttcactctcaccatcagcagtctgcaacctgaagattttgctacgtactactgtcaacagcatcttcgtgttcctatgacgttcggccaagggaccaaggtggaaatcaaacgg

SEQ ID NO: 535 - DNA, 324 bp, Artificial Sequence
  Chemically synthesized ABT1-141-548
gacatccagatgacccagtctccatcctccctgtctgcatctgtaggagaccgtgtcaccatcacttgccgggcagaccagtggattcagaagcagttagcgtggtatcagcagaaaccagggaaagcccctaagctcctgatctattcttcgtcctatttgcaaagtggggtcccatcacgtttcagtggcagtggatctgggacagatttcactctcaccatcagcagtctgcaacctgaagattttgctacgtactactgtcaacagcatcttcgtgttcctatgacgttcggccaagggaccaaggtggaaatcaaacgg

SEQ ID NO: 536 - DNA, 324 bp, Artificial Sequence; identical to SEQ ID NO: 532
  Chemically synthesized ABT1-141-549

SEQ ID NO: 537 - DNA, 324 bp, Artificial Sequence
  Chemically synthesized ABT1-141-550
gacatccagatgacccagtctccatcctccctgtctgcatctgtaggagaccgtgtcaccatcacttgccgggcaagtcagtggattcagaagcagttagcgtggtatcagcagaaaccagggaaagcccctaagctcctgatctattcctcgtcctggttgcaaagtgggatcccatcacgtttcagtggcagtggatctgggacagatttcactctcaccatcagcagtctgcaacctgaagattttgctacgtactactgtcaacagcatcttcgtgttcctatgacgttcggccaagggaccaaggtggaaatcaaacgg

SEQ ID NO: 538 - DNA, 324 bp, Artificial Sequence; identical to SEQ ID NO: 466
  Chemically synthesized ABT1-141-551

SEQ ID NO: 539 - DNA, 324 bp, Artificial Sequence
  Chemically synthesized ABT1-141-552
gacatccagatgacccagtctccatcctccctgtctgcatctgtaggagaccgtgtcaccatcacttgccgggcaagtcagtggattcagaagcagttagcgtggtatcagcagaaaccagggaaagcccctaagctcctgatctatagctcgtcctggttgcaaagtggggtcccatcacgtttcagtggcagtggatctgggacagatttcactctcaccatcagcagtctgcaacctgaagattttgctacgtactactgtcaacagcatcttcgtgttcctatgacgttcggccaagggaccaaggtggaaatcaaacgg

SEQ ID NO: 540 - DNA, 324 bp, Artificial Sequence
  Chemically synthesized ABT1-141-553
gacatccagatgacccagtctccatcctccctgtctgcatctgtaggagaccgtgtcaccatcacttgccgggcaagtcagtggattcagaagcagttagcgtggtatcagcagaaaccagggaaagcccctaagctcctgatctattcgtcgtcctggttgcaaagtggggccccatcacgtttcagtggcagtggatctgggacagatttcactctcaccatcagcagtctgcaacctgaagattttgctacgtactactgtcaacagcatcttcgtgttcctatgacgttcggccaagggaccaaggtggaaatcaaacgg

SEQ ID NO: 541 - DNA, 324 bp, Artificial Sequence; identical to SEQ ID NO: 539
  Chemically synthesized ABT1-141-554

SEQ ID NO: 542 - DNA, 324 bp, Artificial Sequence
  Chemically synthesized ABT1-141-555
gacatccagatgacccagtctccatcctccctgtctgcatctgtaggagaccgtgtcaccatcacttgccgggcaagtcagtggattcagaagcagttagcgtggtatcagcagaaaccagggaaagcccctaagctcctgatctattcctcgtcccactcgcaaagtggggtcccatcacgtttcagtggcagtggatctgggacagatttcactctcaccatcagcagtctgcaacctgaagattttgctacgtactactgtcaacagcatcttcgtgttcctatgacgttcggccaagggaccaaggtggaaatcaaacgg

SEQ ID NO: 543 - DNA, 324 bp, Artificial Sequence
  Chemically synthesized ABT1-141-556
gacatccagatgacccagtctccatcctccctgtctgcatctgtaggagaccgtgtcaccatcacttgccgggcaagtcagtggattcagaagcagttagcgtggtatcagcagaaaccagggaaagcccctaagctcctgatctattcctcgtcctggttgcaaagtggggtcccatcacgtttcagtggcagtggatctgggacagatttcactctcaccatcagcagtctgcaacctgaagattttgctacgtactactgtcaacagcatcttcgtgttcctatgacgttcggccaagggaccaaggtggaaatcaaacgg

SEQ ID NO: 544 - DNA, 324 bp, Artificial Sequence
  Chemically synthesized ABT1-141-557
gacatccagatgacccagtctccatcctccctgtctgcatctgtaggagaccgtgtcaccatcacttgccgggcaagtcagtggattcagaagcagttagcgtggtatcagcagaaaccagggaaagcccctaagctcctgatctatagctcgtcctggatgcaaagtggggtcccatcacgtttcagtggcagtggatctgggacagatttcactctcaccatcagcagtctgcaacctgaagattttgctacgtactactgtcaacagcatcttcgtgttcctatgacgttcggccaagggaccaaggtggaaatcaaacgg

SEQ ID NO: 545 - DNA, 324 bp, Artificial Sequence
  Chemically synthesized ABT1-141-558
gacatccagatgacccagtctccatcctccctgtctgcatctgtaggagaccgtgtcaccatcacttgccgggcaagtcagtggattcagaagcagttagcgtggtatcagcagaaaccagggaaagcccctaagctcctgatctatatgtcgtccgagttgcaaagtggggtcccatcacgtttcagtggcagtggatctgggacagatttcactctcaccatcagcagtctgcaacctgaagattttgctacgtactactgtcaacagcatcttcgtgttcctatgacgttcggccaagggaccaaggtggaaatcaaacgg

SEQ ID NO: 546 - DNA, 324 bp, Artificial Sequence
  Chemically synthesized ABT1-141-559
gacatccagatgacccagtctccatcctccctgtctgcatctgtaggagaccgtgtcaccatcacttgccgggcaagtcagtggattcagaagcagttagcgtggtatcagcagaaaccagggaaagcccctaagctcctgatctattcctcgtcctggtcgcaaagtggggtcccatcacgtttcagtggcagtggatctgggacagatttcactctcaccatcagcagtctgcaacctgaagattttgctacgtactactgtcaacagcatcttcgtgttcctatgacgttcggccaagggaccaaggtggaaatcaaacgg

SEQ ID NO: 547 - DNA, 324 bp, Artificial Sequence
  Chemically synthesized ABT1-141-561
gacatccagatgacccagtctccatcctccctgtctgcatctgtaggagaccgtgtcaccatcacttgccaggcacaccagtggattcagaagcagttagcgtggtatcagcagaaaccagggaaagcccctaagctcctgatctattcctcgtcctggttgcaaagtggggtcccatcacgtttcagtggcagtggatctgggacagatttcactctcaccatcagcagtctgcaacctgaagattttgctacgtactactgtcaacagcatcttcgtgttcctatgacgttcggccaagggaccaaggtggaaatcaaacgg

SEQ ID NO: 548 - DNA, 324 bp, Artificial Sequence
  Chemically synthesized ABT1-141-562
gacatccagatgacccagtctccatcctccctgtctgcatctgtaggagaccgtgtcaccatcacttgccgggcaaaccagtggattcagaagcagttagcgtggtatcagcagaaaccagggaaagcccctaagctcctgatctatagctcgtcctggttgcaaagtggggtcccatcacgtttcagtggcagtggatctgggacagatttcactctcaccatcagcagtctgcaacctgaagattttgctacgtactactgtcaacagcatcttcgtgttcctatgacgttcggccaagggaccaaggtggaaatcaaacgg

SEQ ID NO: 549 - DNA, 324 bp, Artificial Sequence
  Chemically synthesized ABT1-141-563
gacatccagatgacccagtctccatcctccctgtctgcatctgtaggagaccgtgtcaccatcacttgccgggcagacagctggattcagaagcagttagcgtggtatcagcagaaaccagggaaagcccctaagctcctgatctattcttcgtcctatttgcaaagtggggtcccatcacgtttcagtggcagaggatctgggacagatttcactctcaccatcagcagtctgcaacctgaagattttgcttcgtactactgtcaacagcatcttcgtgttcctatgacgttcggccaagggaccaaggtggaaatcaaacgg

SEQ ID NO: 550 - DNA, 324 bp, Artificial Sequence
  Chemically synthesized ABT1-141-564
gacatccagatgacccagtctccatcctccctgtctgcatctgtaggagaccgtgtcaccatcacttgccggagcaacgagtggattcagaagcagttagcgtggtatcagcagaaaccagggaaagcccctaagctcctgatctattcttcgtcctatttgcaaagtggggtcccatcacgtttcagtggcagtggatctgggacagatttcactctcaccatcagcagtctgcaacctgaagattttgctacgtactactgtcaacagcatcttcgtgttcctatgacgttcggccaagggaccaaggtggaaatcaaacgg

SEQ ID NO: 551 - DNA, 324 bp, Artificial Sequence
  Chemically synthesized ABT1-141-565
gacatccagatgacccagtctccatcctccctgtctgcatctgtaggagaccgtgtcaccatcacttgccgggcaagtcagtggattcagaagcagttagcgtggtatcagcagaaaccagggaaagcccctaagctcctgatctattcttcgatgcatctccaaagtggggtcccatcacgtttcagtggcagtggatctgggacagatttcactctcaccatcagcagtctgcaacctgaagattttgctacgtactactgtcaacagcatcttcgtgttcctatgacgttcggccaagggaccaaggtggaaatcaaacgg

SEQ ID NO: 552 - DNA, 324 bp, Artificial Sequence
  Chemically synthesized ABT1-141-567
gacatccagatgacccagtctccatcctccctgtctgcatctgtaggagaccgtgtcaccatcacttgccgggcaagtcagtggattcagaagcagttagcgtggtatcagcagaaaccagggaaagcccctaagctcctgatctactcttcgaaccatccccaaagtggggtcccatcacgtttcagtggcagtggatctgggacagatttcactctcaccatcagcagtctgcaacctgaagattttgctacgtactactgtcaacagcatcttcgtgttcctatgacgttcggccaagggaccaaggtggaaatcaaacgg

SEQ ID NO: 553 - DNA, 324 bp, Artificial Sequence
  Chemically synthesized ABT1-141-568
gacatccagatgacccagtctccatcctccctgtctgcatctgtaggagaccgtgtcaccatcacttgccgggcaagtcagtggattcagaagcagttagcgtggtatcagcagaaaccagggaaagcccctaagctcctgatctattcttcgggccatccccaaagtggggtcccatcacgtttcagtggcagtggatctgggacagatttcactctcaccatcagcagtctgcaacctgaagattttgctacgtactactgtcaacagcatcttcgtgttcctatgacgttcggccaagggaccaaggtggaaatcaaacgg

SEQ ID NO: 554 - DNA, 324 bp, Artificial Sequence
  Chemically synthesized ABT1-141-569
gacatccagatgacccagtctccatcctccctgtctgcatctgtaggagaccgtgtcaccatcacttgccgggccaaccagtggattcagaagcagttagcgtggtatcagcagaaaccagggaaagcccctaagctcctgatctattcttcgtcccatccccaaagtggggtcccatcacgtttcagtggcagtggatctgggacagatttcactctcaccatcagcagtctgcaacctgaagattttgctacgtactactgtcaacagcatcttcgtgttcctatgacgttcggccaagggaccaaggtggaaatcaaacgg

SEQ ID NO: 555 - DNA, 324 bp, Artificial Sequence
  Chemically synthesized ABT1-141-572
gacatccagatgacccagtctccatcctccctgtctgcatctgtaggagaccgtgtcaccatcacttgccggagcaacgagtggattcagaagcagttagcgtggtatcagcagaaaccagggaaagcccctaagctcctgatctattcttcgtcccatttgcaaagtggggtcccatcacgtttcagtggcagtggatctgggacagatttcactctcaccatcagcagtctgcaacctgaagattttgctacgtactactgtcaacagcatcttcgtgttcctatgacgttcggccaagggaccaaggtggaaatcaaacgg

SEQ ID NO: 556 - DNA, 324 bp, Artificial Sequence
  Chemically synthesized ABT1-141-573
gacatccagatgacccagtctccatcctccctgtctgcatctgtaggagaccgtgtcaccatcacttgccggaccaacgagtggattcagaagcagttagcgtggtatcagcagaaaccagggaaagcccctaagctcctgatctattcttcggcccataggcaaagtggggtcccatcacgtttcagtggcagtggatctgggacaggtttcactctcaccatcagcagtctgcaacctgaagattttgctacgtactactgtcaacagcatcttcgtgttcctatgacgttcggccaagggaccaaggtggaaatcaaacgg

SEQ ID NO: 557 - DNA, 324 bp, Artificial Sequence
  Chemically synthesized ABT1-141-574
gacatccagatgacccagtctccatcctccctgtctgcatctgtaggagaccgtgtcaccatcacttgccggatcaacgagtggattcagaagcagttagcgtggtatcagcagaaaccagggaaagcccctaagctcctgatctattcttcgacacatccgcaaagtggggtcccatcacgtttcagtggcagtggatctgggacagatttcactctcaccatcagcagtctgcaacctgaagattttgctacgtactactgtcaacagcatcttcgtgttcctatgacgttcggccaagggaccaaggtggaaatcaaacgg

SEQ ID NO: 558 - DNA, 324 bp, Artificial Sequence
  Chemically synthesized ABT1-142
gacatccagatgacccagtctccatcctccctgtctgcatctgtaggagaccgtgtcaccatcacttgccgggcaagtcagtcgattaatgatgtgttagcttggtaccagcagaaaccagggaaagcccctaggctcctgatctattcggcttcctatttgcaaagtggggtcccatcacgtttcagtggcagtggatctgggacagatttcactctcaccatcagcagtctgcaacctgaagattttgctacgtactactgtcaacagtatattagtcttccttttacgttcggccaagggaccaaggtggaaatcaaacgg

SEQ ID NO: 559 - DNA, 324 bp, Artificial Sequence
  Chemically synthesized ABT1-143
gacatccagatgacccagtctccatcctccctgtctgcatctgtaggagaccgtgtcaccatcacttgccgggcaagtcagaggattgatcgtcatttatcttggtatcagcagaaaccagggaaagcccctaagctcctgatctataagacttccaagttgcaaagtggggtcccatcacgtttcagtggcagtggatctgggacagatttcacactcaccatcagcagtctgcaacctgaagattttgctacgtactactgtcagcagcttcatgctaagccttttacgttcggtcaagggaccaaggtggaaatcaaacgg

SEQ ID NO: 560 - DNA, 324 bp, Artificial Sequence
  Chemically synthesized ABT1-144
gacatccagatgacccagtctccatcctccctgtctgcatctgtaggagaccgtgtcactatcacttgccgggcaagtcagcggattaagaagtatttagcttggtaccagcagaaaccagggaaagcccctaggctcctgatctatcgttcttcccagttgcaaagtggggtcccatcacgtttcagtggcagtggatctgggacagatttcactctcaccatcagcagtctgcaacctgaagattttgctacgtactactgtcaacagtcgtttaagaggcctgttacgttcggccaagggaccaaggtggaaatcaaacgg

SEQ ID NO: 561 - DNA, 324 bp, Artificial Sequence
  Chemically synthesized ABT1-145
gacatccagatgacccagtctccatcctccctgtctgcatctgtaggagaccgtgtcaccatcacttgccgggcaagtcaggatattgatgatggtttagcgtggtatcagcagaaacccgggaaagcccctaagctcctgatctatcgtacgtcccggttgcaaagtggggtcccatcacgtttcagtggcagtggatctgggacagatttcactctcaccatcagcagtctgcaacctgaagattttgctacgtactactgtcaaccgacttggctgcctccttgtacgttcggccaagggaccaaggtggaaatcaaacgg

SEQ ID NO: 562 - DNA, 324 bp, Artificial Sequence
  Chemically synthesized ABT1-146
gacatccagatgacccagtctccatcctccctgtctgcatctgtaggagaccgtgtcaccatcacttgccgggcaagtcagaatattaagacgtttttacattggtatcagcagaaaccagggaaagcccctaagctcctgatctatcgtgtttcccatttgcaaagtggggttccatcacgtttcagtggcagtggatctgggacagatttcactctcaccatcagcagtctgcaacctgaagattttgctacgtactactgtcaacaggagtatcgtattcctcttacgttcggccaagggaccaaggtggaaatcaaacgg

SEQ ID NO: 563 - DNA, 324 bp, Artificial Sequence
  Chemically synthesized ABT1-148
gacatccagatgacccagtctccatcctccctgtctgcatctgtaggagaccgtgtcaccatcacttgccgggcaagtcagagcattagcagctatttaaattggtaccagcagaaaccagggaaagcccctaagctcctgatcggggctctgtccggtttgcaaagtggggtcccatcacgtttcagtggcagtggatctgggacagatttcactctcaccatcagcagtctgcaacctgaagattttgctacgtactactgtatgcagtggtatcgtcatccttctacgttcggccaagggaccaaggtggaaatcaaacgg

SEQ ID NO: 564 - DNA, 360 bp, Artificial Sequence
  Chemically synthesized ABT1-149
gacatccagatgacccagtctccatcctctctgtctgcatctgtaggagaccgtgtcaccatcacttgccgggcaagtcagagcattagcagctatttaaattggtaccagcagaaaccagggaaagcccctaagctcctgatcggtgggctgtccggtttgcaaagtggggtcccatcacgtttcagtggcagtggatctgggacagatttcactctcaccatcagcagtctgcaacctgaagattttgctacgtactactgtatgcagtggtggcggtggccttcgacgttcggccaagggaccaaggtggaaatcaagcgggcggccgcagaacaaaaactcatctcagaagaggat

SEQ ID NO: 565 - DNA, 360 bp, Artificial Sequence
  Chemically synthesized ABT1-150
gacatccagatgacccagtctccatcctccctgtctgcatctgtaggagaccgtgtcaccatcacttgccgggcaagtcagagcattagcagctatttaaattggtaccagcagaaaccagggaaagcccctaagctcctgatcgggggtgtttccggtttgcaaagtggggtcccatcacgtttcagtggcagtggatctgggacagatttcactctcaccatcagcagtctgcaacctgaagattttgctacgtactactgtatgcagtggtggcggtggccttcgacgttcggccaagggaccaaggtggaaatcaaacgggcggccgcagaacaaaaactcatctcagaagaggat

SEQ ID NO: 566 - DNA, 360 bp, Artificial Sequence
  Chemically synthesized ABT1-151
gacatccagatgacccagtctccatcctccctgtctgcatctgtaggagaccgtgtcaccatcacttgccgggcaagtcagagcattagcagctatttaaattggtaccagcagaaaccagggaaagcccctaagctcctgatcgggggtcgttccgggttgcaaagtggggtcccatcacgtttcagtggcagtggatctgggacagatttcactctcaccatcagcagtctgcaacctgaagattttgctacgtactactgtgggcagtggtatcggcatcctgcgacgttcggccaagggaccaaggtggaaatcaaacgggcggccgcagaacaaaaactcatctcagaagaggat

SEQ ID NO: 567 - DNA, 360 bp, Artificial Sequence
  Chemically synthesized ABT1-152
gacatccagatgacccagtctccatcctccctgtctgcatctgtaggagaccgtgtcaccatcacttgccgggcaagtcagagcattagcagctatttaaattggtaccagcagaaaccagggaaagcccctaagctcctgatcggggggaggtccggtttgcaaagtggggtcccatcacgtttcagtggcagtggatctgggacagatttcactctcaccatcggcagtctgcaacctgaagattttgctacgtactactgcatgcagtggtatagggcgcctagtacgttcggccaagggaccaaggtggaaatcaaacgggcggccgcagaacaaaaactcatctcagaagaggat

SEQ ID NO: 568 - DNA, 360 bp, Artificial Sequence
  Chemically synthesized ABT1-153
gacatccagatgacccagtctccatcctccctgtctgcatctgtaggagaccgtgtcaccatcacttgccgggcaagtagtcctattgtggctaatttacgttggtaccagcagaaaccagggaaagcccctaagctcctgatctatgctgcatccagtttgcaaagtggggtcccatcacgtttcagtggcagtggatctgggacagatttcactctcaccatcagcagtctgcaacctgaagattttgctacgtactactgtactcaggggtatgtgtggcctccgacgttcggccaagggaccaaggtggaaatcaaacgggcggccgcagaacaaaaactcatctcagaagaggat

SEQ ID NO: 569 - DNA, 324 bp, Artificial Sequence
  Chemically synthesized ABT1-154
gacatccagatgacccagtctccatcctccctgtctgcatctgtaggagaccgtgtcaccatcacttgccgggcaagtactgagattgtgcgtaatttacggtggtaccagcagaaaccagggaaagcccctaagctcctgatctcgggtgtttccgggttgcaaagtggggtcccatcacgtttcagtggcagtggatctgggacagatttcactctcaccatcagcagtctgcaacctgaagattttgctacgtactactgtgttcagggttattcttggcctgttacgttcggccaagggaccaaggtggaaatcaaacgg

SEQ ID NO: 570 - DNA, 324 bp, Artificial Sequence
  Chemically synthesized ABT1-155
gacatccagatgacccagtctccatcctccctgtctgcatctgtaggagaccgtgtcaccatcacttgccgggcaagtagtcctattgtggctaatttacgttggtaccagcagaaaccagggaaagcccctaagctcctgatctatgctgcatccagtttgcaaagtggggtcccatcacgtttcagtggcagtggatctgggacagatttcactctcaccatcagcagtctgcaacctgaagattttgctacgtactactgtactcaggggtatgtgtggcctccgacgttcggccaagggaccaaggtggaaatcaaacgg

SEQ ID NO: 571 - DNA, 324 bp, Artificial Sequence
  Chemically synthesized ABT1-156
gacatccagatgacccagtctccatcctccctgtctgcatctgtaggagaccgtgtcaccatcacttgccgggcaagttcgactattttggataagttagagtggtaccagcagaaaccagggaaagcccctaagctcctgatctctggtgcgtcctggttgcaaagtggggtcccatcacgtttcagtggcagtggatctgggacagatttcactctcaccatcagcagtctgcaacctgaagattttgctacgtactactgtcggcaggcgttgtgggatcctccgacgttcggccaagggaccaaggtggaaatcaaacgg

SEQ ID NO: 572 - DNA, 324 bp, Artificial Sequence
  Chemically synthesized ABT1-157
gacatccagatgacccagtctccatcctccctgtctgcatctgtaggagaccgtgtcaccatcacttgccgggcaagtcagagcattagcagctatttaaattggtaccagcagaaaccagggaaagcccctaagctcctgatcgggggtgtgtccgggttgcaaagtggggtcccatcacgtttcagtggcagtggatctgggacagatttcactctcaccatcagcagtctgcaacctgaagattttgctacgtactactgtatgcagtggtctcggccgcctcggacgttcggccaagggaccaaggtggaaatcaaacgg

SEQ ID NO: 573 - DNA, 321 bp, Artificial Sequence
  Chemically synthesized ABT1-158
gacatccagatgacccagtctccatcctccctgtctgcatctgtaggagaccgtgtcaccatcacttgccgggcaagtaggtctattgggcgtgggttaaattggtaccagcagaaaccagggaaagcccctaagctcctgatcggggggtggtccgggttgcaaagtggggtcccatcacgtttcagtggcagtggatctgggacagatttcactctcaccatcagcagtctgcaacctgaagattttgctacgtactactgtgctcaggcgtcgccgcttccgacgttcggccaagggaccaaggtggaaatcaaacgg

SEQ ID NO: 574 - DNA, 324 bp, Artificial Sequence
  Chemically synthesized ABT1-159
gacatccagatgacccagtctccatcctccctgtctgcatctgtaggagaccgtgtcaccatcacttgccgggcaagtagtcctattggtatggatttattttggtaccagcagaaaccagggaaagcccctaggctcctgatcgatggtgtgtccggtttgcaaagtggggtcccatcacgtttcagtggcagtggatctgggacagatttcactctcaccatcagcagtctgcaacctgaagattttgctacgtactactgttctcagcattggcctgcgcctctgacgttcggccaagggaccaaggtggaaatcaaacgg

SEQ ID NO: 575 - DNA, 324 bp, Artificial Sequence
  Chemically synthesized ABT1-160
gacatccagatgacccagtctccatcctccctgtctgcatctgtaggagaccgtgtcaccatcacttgtcgggcaagtactgagattgtgcgtaatttacggtggtaccagcagaaaccagggaaagcccctaatctcctgatctgggggggttccactttgcaaagtggggtcccatcacgtttcagtggcagtggatctgggacagatttcactctcaccatcagcagtctgcaacctgaagattttgctacgtactactgtgttcagggttattctttgcctgttacgttcggccaagggaccaaggtggaaatcaaacgg

SEQ ID NO: 576 - DNA, 324 bp, Artificial Sequence
  Chemically synthesized ABT1-161
gacatccagatgacccagtctccatcctccctgtctgcatctgtaggagaccgtgtcaccatcacttgccgggcaagtcatgctattactggtagtttacgttggtaccagcagaaaccagggaaagcccctaagctcctgatcagtggtgggtccgtgttgcaaagtggggtcccatcacgtttcagtggcagtggatctgggacagatttcactctcaccatcagcagtctgcaacctgaagattttgctacgtactactgtgctcagtggttgggggggcctatgacgttcggccaagggaccaaggtggaaatcaaacgg

SEQ ID NO: 577 - DNA, 324 bp, Artificial Sequence
  Chemically synthesized ABT1-162
gacatccagatgacccagtctccatcctccctgtctgcatctgtaggaggccgcgtcaccatcacttgccgggcaagtcattatattaggaatcggttacattggtaccagcagaaaccagggaaagcccctaagctcctgatcgcgcgtgggtccgctttgcaaagtggggtcccatcacgtttcagtggcagtggatctgggacagatttcactctcaccatcagcagtctgcaacctgaagattttgctacgtactactgtgtgcaggatggttatctgcctcctacgttcggccaagggaccaaggtggaaatcaaacgg

SEQ ID NO: 578 - DNA, 324 bp, Artificial Sequence
  Chemically synthesized ABT1-163
gacatccagatgacccagtctccatcctccctgtctgcatctgtaggagaccgtgtcaccatcacttgccgggcaagtgggaatattgtgcataatttacgttggtaccagcagaaaccagggaaagcccctaagctcctgatctatgctgcatccaggttgcaaagtggggtcccatcacgtttcagtggcagtggatctgggacagatttcactctcaccatcagcagtctgcaacctgaagattttgctacgtactactgtgcgcaggggtatgagtggcctcttacgttcggccaagggaccaaggtggaaatcaaacag

SEQ ID NO: 579 - DNA, 324 bp, Artificial Sequence
  Chemically synthesized ABT1-164
gacatccagatgacccagtctccatcctccctgtctgcatctgtaggagaccgtgtcaccatcacttgccgggcaagtcgtccgattgctggtaatttacggtggtaccagcagaaaccagggaaagcccctaagctcctgatctggggggcgtcctcgttgcaaagtggggtcccatcacgtttcagtggcagtggatctgggacagatttcactctcaccatcagcagtctgcaacctgaagattttgctacgtactactgtgtgcaggggtggcagtggcctattacgttcggccaagggaccaaggtggaaatcaaacgg

SEQ ID NO: 580 - DNA, 324 bp, Artificial Sequence
  Chemically synthesized ABT1-165
gacatccagatgacccagtctccatcctccctgtctgcatctgtaggagaccgtgtcaccatcacttgccgggcaagttcttcgattagggcgggtttagcttggtaccagcagaaaccagggaaagcccctaagctcctgatcgggcctgagtccgggttgcaaagtggggtcccatcacgtttcagtggcagtggatctgggacagatttcactctcaccatcagcagtctgcaacctgaagattttgctacgtactactgtgggcaggggattgatggtcctgctacgttcggccaagggaccaaggtggaaatcaaacgg

SEQ ID NO: 581 - DNA, 324 bp, Artificial Sequence
  Chemically synthesized ABT1-166
gacatccagatgacccagtctccatcctccctgtctgcatctgtaggagaccgtgtcaccatcacttgccgggcaagtcagagcattagcagctatttaaattggtaccagcagaaaccagggaaagcccctaagctcctgatcggtggtctgtccggtttgcaaagtggggtcccatcacgtttcagtggcagtggatctgggacagatttcactctcaccatcagcagtctgcaacctgaagattttgctacgtactactgtggtcagtgggcgcgtgctcctatgacgttcggccaagggaccaaggtggaaatcaaacgg

SEQ ID NO: 582 - DNA, 324 bp, Artificial Sequence
  Chemically synthesized ABT1-167
gacatccagatgacccagtctccatcctccctgtctgcatctgtaggagaccgtgtcaccatcacttgccgggcaagtcagagcattagcagctatttaaattggtaccagcagaaaccagggaaagcccctaagctcctgatcggtgggctgtccggtttgcaaagtggggtcccatcacgtttcagtggcagtggatctgggacagatttcactctcaccatcagcagtctgcaacctgaagattttgctacgtactactgtatgcagtggtggcggtatcctcctacgttcggccaagggaccaaggtggaaatcaaacgg

SEQ ID NO: 583 - DNA, 324 bp, Artificial Sequence
  Chemically synthesized ABT1-168
gacatccagatgacccagtctccatcctccctgtctgcatctgtaggagaccgtgtcaccatcacttgccgggcaagtcagagcattagcagctatttaaattggtaccagcagaaaccagggaaagcccctaagctcctgatcggggggctgtccggtttgcaaagtggggtcccatcacgtttcagtggcagtggatctgggacagatttcactctcaccatcagcagtctgcaacctgaagattttgctacgtactactgtctgcagtggttttctgagcctgctacgttcggccaagggaccaaggtggaaatcaaacgg

SEQ ID NO: 584 - DNA, 324 bp, Artificial Sequence
  Chemically synthesized ABT1-169
gacatccagatgacccagtctccatcctccctgtctgcatctgtaggagaccgtgtcaccatcacttgccgggcaagtcagagcattagcagctatttaaattggtaccagcagaaaccagggaaagcccctaagctcctgatcggtgggttgtccgggttgcaaagtggggtcccatcacgtttcagtggcagtggatctgggacagatttcactctcaccatcagcagtctgcaacctgaagattttgctacgtactactgtatgcagtggtggcggtggccttcgacgttcggccaagggaccaaggtggaaatcaaacgg

SEQ ID NO: 585 - DNA, 324 bp, Artificial Sequence
  Chemically synthesized ABT1-170
gacatccagatgacccagtctccatcctccctgtctgcatctgtaggagaccgtgtcaccatcacttgccgggcaagtcagagcattagcagctatttaaattggtaccagcagaaaccagggaaagcccctaagctcctgatcgggggtcggtccgggttgcaaagtggggtcccatcacgtttcagtggcagtggatctgggacagatttcactctcaccatcagcagtctgcaacctgaagattttgctacgtactactgtaagcagtggtataggtatccttctacgttcggccaagggaccaaggtggaaatcaaacgg

SEQ ID NO: 586 - DNA, 324 bp, Artificial Sequence
  Chemically synthesized ABT1-171
gacatccagatgacccagtctccatcctccctgtctgcatctgtaggagaccgtgtcaccatcacttgccgggcaagtcagagcattagcagctatttaaattggtaccagcagaaaccagggaaagcccctaagctcctgatcggggggcggtccggtttgcaaagtggggtcccatcacgtttcagtggcagtggatctgggacagatttcactctcaccatcagcagtctgcaacctgaagattttgctacgtactactgtatgcagtggtttcgtccgcctaggacgttcggccaagggaccaaggtggaaatcaaacgg

SEQ ID NO: 587 - DNA, 324 bp, Artificial Sequence
  Chemically synthesized ABT1-172
gacatccagatgacccagtctccatcctccctgtctgcatctgtaggagaccgtgtcaccatcacttgccgggcaagtcagcgtattcgtaatggtttagagtggtaccagcagaaaccagggaaagcccctaagctcctgatctgggggtcgtcccgtttgcaaagtggggtcccatcacgtttcagtggcagtggatctgggacagatttcactctcaccatcagcagtctgcaacctgaagattttgctacgtactactgtgcgcagacggtttggggtcctgcgacgttcggccaagggaccaaggtggaaatcaaacgg

SEQ ID NO: 588 - DNA, 324 bp, Artificial Sequence
  Chemically synthesized ABT1-221
gacatccagatgacccagtctccatcctccctgtctgcatctgtaggggaccgtgttaccatcacttgccgggcaagtcaggatatttggccttatttaatgtggtatcagcagaaaccagggaaagcccctaagctcctaatctattattcttccatgttgcaaagtggggtcccatcacgtttcagtggcagtggatctgggacagatttcactctcaccatcagcagtctgcaacctgaagattttgctacgtactactgtcaacagtttaggaggtggccttatacgttcggccaagggaccaaggtggaaatcaaacgg

SEQ ID NO: 589 - DNA, 360 bp, Artificial Sequence
  Chemically synthesized ABT2 VH dAbs:ABT2-10
gaggtgcagctgttggagtctgggggaggcttggtacagcctggggggtccctgcgtctctcctgtacagcctccggattcacctttaataggtataatatggcgtgggcccgccaggctccagggaagggtctagagtgggtctcagagattgatcttaagggtagtcagacatactacgcagactccgtgaagggccggttcaccatctcccgcgacaattccaagaacacgctgtatctgcaaatgaacagcctgcgtgccgaggacaccgcggtatattactgtgcgaaagtgagtattagtgcgtatcatatgtttgactactggggtcagggaaccctggtcaccgtctcgagc

SEQ ID NO: 590 - DNA, 360 bp, Artificial Sequence
  Chemically synthesized ABT2-11
gaggtgcagctgttggagtctgggggaggcttggtacagcctggggggtccctgcgtctctcctgtgcagcctccggattcacctttgataattattctatgacgtgggtccgccaggctccagggaagggtctggagtgggtctcagctattagtggtagtggtggtagcacatactacgcagactccgtgaagggccggttcaccatctcccgcgacaattccaagaacacgctgtatctgcaaatgaacagcctgcgtgccgaggataccgcggtatattactgtgcgaaatgtattgatcgtttgccttgtctgtttgactactggggtcagggaaccctggtcaccgtctcgagc

SEQ ID NO: 591 - DNA, 351 bp, Artificial Sequence
  Chemically synthesized ABT2-12
gaggtgcagctgttggagtctgggggaggcttggtacagcctggggggtccctgcgtctctcctgtgcagcctccggattcacctttacgggttatgatatggcttgggtccgccaggctccagggaagggtctagagtgggtctcagtgatttatgcttatggtgagtctacatactacgcagactccgtgaagggccggttcaccatctcccgcgacaattccaagaacacgctgtatctgcaaatgaacagcctgcgtgccgaggacaccgcggtatattactgtgcgaaaatgacttctgcttcttttgactactggggtcagggaaccctggtcaccgtctcgagc

SEQ ID NO: 592 - DNA, 348 bp, Artificial Sequence
  Chemically synthesized ABT2-13
gaggtgcagctgttggagtctgggggaggcttggtacagcctggggggtccctgcgtctctcctgtgcagcctccggattcacctttcgggattatgttatgtattgggcccgccaggctccagggaagggtctagagtgggtctcaaggattgatcctatgggtagttcgacatactacgcagactccgtgaagggccggttcaccatctcccgcgacaattccaagaacacgctgtatctgcaaatgaacagcctgcgtgccgaggacaccgcggtatattactgtgcgaaacctgagggtaattttgactactggggtcagggaaccctggtcaccgtctcgagc

SEQ ID NO: 593 - DNA, 351 bp, Artificial Sequence
  Chemically synthesized ABT2-14
gaggtgcagctgttggagtctgggggaggcctggtacagcctggggggtccctgcgtctctcctgtgcagcctccggattcacctttgcggattatgatatgtcttgggtccgccaggctccagggaagggtctagagtgggtctcaactatttatggttttggttttgcgacatactacgcagactccgtgaagggccggttcaccatctcccgcgacaattccaagaacacgctgtatctgcaaatgaacagcctgcgtgccgaggacaccgcggtatattactgtgcgaaaacgttggctggggggtttgactactggggtcagggaaccctggtcaccgtctcgagc

SEQ ID NO: 594 - DNA, 351 bp, Artificial Sequence
  Chemically synthesized ABT2-15
gaggtgcagctgttggagtctgggggaggcttggtacagcctggggggtccctgcgtctctcctgtgcagcctccggattcacctttagggcttatgatatggggtgggtccgccaggctccagggaagggtctagagtgggtctcagttatttatgcgtggggtactagtacatactacgcagactccgtgaagggccggttcaccatctcccgcgacaattccaagaacacgctgtatctgcaaatgaacagcctgcgtgccgaggacaccgcggtatattactgtgcgaaaatggctaatgctaagtttgactactggggtcagggaaccctggtcaccgtctcgagc

SEQ ID NO: 595 - DNA, 354 bp, Artificial Sequence
  Chemically synthesized ABT2-16
gaggtgcagctgttggagtctgggggaggcttggtacagcctggggggtccctgcgtctctcctgtgcagcctccggattcacctttagggcttatgatatggggtgggtccgccaggctccagggaagggtctagagtgggtctcagttatttatgcgtggggtactagtacatactacgcagactccgtgaagggccggttcaccatctcccgcgacaattccaagaacacgctgtatctgcaaatgaacagcctgcgtgccgaggacaccgcggtatattactgtgcgaaaaataaggggcatgggcagtttgactactggggtcagggaaccctggtcaccgtctcgagc

SEQ ID NO: 596 - DNA, 351 bp, Artificial Sequence
  Chemically synthesized ABT2-17
gaggtgcagctgttggagtctgggggaggcttggtacagcctggggggtccctgcgtctctcctgtgcagcctccggattcacctttagggcttatgatatggggtgggtccgccaggctccagggaagggtctagagtgggtctcagttatttatgcgtggggtactagtacatactacgcagactccgtgaagggccggttcaccatctcccgcgacaattccaagaacacgctgtatctgcaaatgaacagcctgcgtgccgaggataccgcggtatattactgtgcgaaaatgaaggggagtacttttgactactggggtcagggaaccctggtcaccgtctcgagc

SEQ ID NO: 597 - DNA, 351 bp, Artificial Sequence
  Chemically synthesized ABT2-19
gaggtgcagctgttggagtctgggggaggcttggtacagcctggggggtccctgcgtctctcctgtgcagcctccggattcacctttagggcttatgatatggggtgggtccgccaggctccagggaagggtctagagtgggtctcagttatttatgcgtggggtactagtacatactacgcagactccgtgaagggccggttcaccatctcccgcgacaattccaagaacacgctgtatctgcaaatgaacagcctgcgtgccgaggacaccgcggtatattactgtgcgaaaacgtctccggagtcttttgactactggggtcagggaaccctggtcaccgtctcgagc

SEQ ID NO: 598 - DNA, 351 bp, Artificial Sequence
  Chemically synthesized ABT2-20
gaggtgcagctgttggagtctgggggaggcttggtacagcctggggggtccctgcgtctctcctgtgcagcctccggattcacctttagggcttatgatatggggtgggtccgccaggctccagggaagggtctagagtgggtctcagttatttatgcgtggggtactagtacatactacgcagactccgtgaagggccggttcaccatctcccgcgacaattccaagaacacgctgtatctgcaaatgaacagcctgcgtgccgaggactccgcggtatattactgtgcgaaacctagtattgatggttttgactactggggtcagggaaccctggtcaccgtctcgagc

SEQ ID NO: 599 - DNA, 351 bp, Artificial Sequence
  Chemically synthesized ABT2-21
gaggtgcagctgttggagtctgggggaggcttggtacagcctggggggtccctgcgtctctcctgtgcagcctccggattcacctttagggcttatgatatggggtgggtccgccaggctccagggaagggtctagagtgggtctcagttatttatgcgtggggtactagtacatactacgcagactccgtgaagggccggttcaccatctcccgcgacaattccaagaacacgctgtatctgcaaatgaacagcctgcgtgccgaggacaccgcggtatattactgtgcgaaagttagtagtgatacttttgactactggggtcagggaaccctggtcaccgtctcgagc

SEQ ID NO: 600 - DNA, 360 bp, Artificial Sequence
  Chemically synthesized ABT2-22
gaggtgcagctgttggagtctgggggaggcttggtacagcctggggggtccctgcgtctctcctgtgcagcctccggattcacccttagggcttatgatatggggtgggtccgccaggctccagggaagggtctagagtgggtctcagttatttatgcgtggggtactagtacatactacgcagactccgtgaagggccggttcaccatctcccgcgacaattccaagaacacgctgtatctgcaaatgaacagcctgcgtgccgaggacaccgcggtatattactgtgcgaaagggcctttgtctacgcatgatagttttgactactggggtcagggaaccctggtcaccgtctcgagc

SEQ ID NO: 601 - DNA, 360 bp, Artificial Sequence
  Chemically synthesized ABT2-23
gaggtgcagctgttggagtctgggggaggcttggtacagcctggggggtccctgcgtctctcctgtgcagcctccggattcacctttagggcttatgatatggggtgggtccgccaggctccagggaagggtctagagtgggtctcagttatttatgcgtggggtactagtacatactacgcagactccgtgaagggccggttcaccatctcccgcgacaattccaagaacacgctgtatctgcaaatgaacagcctgcgtgccgaggacaccgcggtgtattactgtgcgaaagggaattcgagtttggatccgaattttgactactggggtcagggaaccctggtcaccgtctcgagc

SEQ ID NO: 602 - DNA, 360 bp, Artificial Sequence
  Chemically synthesized ABT2-24
gaggtgcagctgttggagtctgggggaggcttggtacagcctggggggtccctgcgtctctcctgtgcagcctccggattcacctttagggcttatgatatggggtgggtccgccaggctccagggaagggtctagagtgggtctcagttatttatgcgtggggtactagtacatactacgcagactccgtgaagggccggttcaccatctcccgcgacgattccaagaacacgctgtatctgcaaatgaacagcctgcgtgccgaggataccgcggtatattactgtgcgaaaactcagcctaggtctctggataattttgactactggggtcagggaaccctggtcaccgtctcgagc

SEQ ID NO: 603 - DNA, 357 bp, Artificial Sequence
  Chemically synthesized ABT2-25
gaggtgcagctgttggagtctgggggaggcttggtacagcctggggggtccctgcgtctctcctgtgcagcctccggattcaccttttctaagtataagatgtcgtgggtccgccaggctccagggaagggtctagagtgggtctcaagtattagtagttctggttctactacatactacgcagactccgtgaagggccggttcaccatctcccgcgacaattccaagaacacgctgtatctgcaaatggacagcctgcgtgccgaggacaccgcggtatattactgtgcgaaacctctgttgttggatgtggagtttgactactggggtcagggaaccctggtcaccgtctcgagc

SEQ ID NO: 604 - DNA, 357 bp, Artificial Sequence
  Chemically synthesized ABT2-26
gaggtgcagctgttggagtctgggggaggcttggtacagcctggggggtccctgcgtctctcctgtgcagcctccggattcaccttttctaattataagatgtcgtgggtccgccaggctccagggaagggtctagagtgggtctcaagtattaatacttctggttctactacatactacgcagactccgtgaagggccggttcaccatctcccgcgacaattccaagaacacgctgtatctgcaaatggacagcctgcgtgccgaggacaccgcggtatattactgtgcgaaacctctgttgttggatgtggagtttgactactggggtcagggaaccctggtcaccgtctcgagc

SEQ ID NO: 605 - DNA, 360 bp, Artificial Sequence
  Chemically synthesized ABT2-27
gaggtgcagctgttggagtctgggggaggcttggtacagcctggggggtccctgcgtctctcctgtgcagcctccggattcacctttgcgcattattcgatgtggtgggtccgccaggctccagggaagggtctagagtgggtctcacgtattgggtctccgggtaatgatacatactacgcagactccgtgaagggccggttcaccatctcccgcgacaattccaagaacacgctgtatctgcaaatgaacagcctgcgtgccgaggacaccgcggtatattactgtgcgaaatttgggtttaggtctgcggagtcttttgactactggggtcagggaaccctggtcaccgtctcgagc

SEQ ID NO: 606 - DNA, 360 bp, Artificial Sequence
  Chemically synthesized ABT2-28
gaggtgcagctgttggagtctgggggaggcttggtacagcctggggggtccctgcgtctctcctgtgcagcctccggattcacctttacgggttatgatatggcttgggtccgccaggctccagggaagggtctagagtgggtctcagtgatttatgcttatggtgagtctacatactacgcagactccgtgaagggccggttcaccatctcccgcgacaattccaagaacacgctgtatctgcaaatgaacagcctgcgtgccgaggataccgcggtatattactgtgcgaaacctgtgcaggggtcgttgttggggtttgactactggggtcagggaaccctggtcaccgtctcgagc

SEQ ID NO: 607 - DNA, 363 bp, Artificial Sequence
  Chemically synthesized ABT2-29
gaggtgcagctgttggagtctgggggaggcttggtacagcctggggggtccctgcgtctctcctgtgcagcctccggattcacctttagggcttatgatatggggtgggtccgccaggctccagggaagggtctagagtgggtctcagttatttatgcgtggggtactagtacatactacgcagactccgtgaagggccggttcaccatctcccgcgacaattccaagaacacgctgtatctgcaaatgaacagcctgcgtgccgaggacaccgcggtatattactgtgcgaaagcgacgtttgggaatctggaggagtcgtttgactactggggtcagggaaccctggtcaccgtctcgagc

SEQ ID NO: 608 - DNA, 366 bp, Artificial Sequence
  Chemically synthesized ABT2-30
gaggtgcagctgttggagtctgggggaggcttggtacagcctggggggtccctgcgtctctcctgtgcagcctccggattcacctttagggcttatgatatggggtgggtccgccaggctccagggaagggtctagagtgggtctcagttatttatgcgtggggtactagtacatactacgcagactccgtgaagggccggttcaccatctcccgcgacaattccaagaacacgctgtatctgcaaatgaacagcctgcgtgccgaggacaccgcggtatattactgtgcgaaatattcggctgggccttttgggcagacgctgtttgactactggggtcagggaaccctggtcaccgtctcgagc

SEQ ID NO: 609 - DNA, 366 bp, Artificial Sequence
  Chemically synthesized ABT2-31
gaggtgcagctgttggagtctgggggaggcttggtacagcctggggggtccctgcgtctctcctgtgcagcctccggattcacctttacgggttatgatatggcttgggtccgccaggctccagggaagggtctagagtgggtctcagtgatttatgcttatggtgagtctacatactacgcagactccgtgaagggccggttcaccatctcccgcgacaattccaagaacacgctgtatctgcaaatgaacagcctgcgtgccgaggacaccgcggtatattactgtgcgaaaaagagtaaggggccttctggtcttcgtacgtttgactactggggtcagggaaccctggtcaccgtctcgagc

SEQ ID NO: 610 - DNA, 363 bp, Artificial Sequence
  Chemically synthesized ABT2-32
gaggtgcagctgttggagtctgggggaggcttggtacagcctggggggtccctgcgtctctcctgtgcagcctccggattcacctttacgggttatgatatggcttgggtccgccaggctccagggaagggtctagagtgggtctcagtgatttatgcttatggtgagtctacatactacgcagactccgtgaagggccggttcaccatctcccgcgacaattccaagaacacgctgtatctgcaaatgaacagcctgcgtgccgaggacaccgcggtatattactgtgcgaaaactacgccgaagtctaatctgcgtgattttgactactggggtcagggaaccctggtcaccgtctcgagc

SEQ ID NO: 611 - DNA, 366 bp, Artificial Sequence
  Chemically synthesized ABT2-33
gaggtgcagctgttggagtctgggggaggcttggtacagcctggggggtccctgcgtctctcctgtgcagcctccggattcacctttgaggattatgctatggcttgggcccgccaggctccagggaagggtctagagtgggtctcatctattttggcggatggtcattcgacacactacgcagactccgtgaagggccggttcaccatctcccgcgacaattccaagaacacgctgtatctgcaaatgaacagcctgcgtgccgaggacaccgcggtatattactgtgcgaaaccttatgcggcggtttttaatcgtgtgtattttgactactggggtcagggaaccctggtcaccgtctcgagc

SEQ ID NO: 612 - DNA, 372 bp, Artificial Sequence
  Chemically synthesized ABT2-35
gaggtgcagctgttggagtctgggggaggcttggtacagcctggggggtccctgcgtctctcctgtgcagcctccggattcacctttggtgagtatgatatggcttgggtccgccaggctccagggaagggtctagaatgggtctcagttatttatgcgtggggtactagtacatactacgcagactccgtgaagggccggttcaccatctcccgcgacaattccaagaacacgctgtatctgcaaatgaacagcctgcgtgccgaggacaccgcggtatattactgtgcgaaaatgggtggtgggcttgtttctcttcctcagtctaagtttgactactggggtcagggaaccctggtcaccgtctcgagc

SEQ ID NO: 613 - DNA, 369 bp, Artificial Sequence
  Chemically synthesized ABT2-36
gaggtgcagctgttggagtctgggggaggcttggtacagcctggggggtccctgcgtctctcctgtgcagcctccggattcacctttcagtcgtatgatatgtgttgggtccgccaggctccagggaagggtctagagtgggtctcatgtatttatgcttatggtacgagtacatactacgcagactccgtgaagggccggttcaccatctcccgcgacaattccaagaacacgctgtatctgcaaatgaacagcctgcgtgccgaggacaccgcggtatattactgtgcgaaacctgctgttggtacgcatcgtcagcgggctgtttttgactactggggtcagggaaccctggtcaccgtctcgagc

SEQ ID NO: 614 - DNA, 369 bp, Artificial Sequence
  Chemically synthesized ABT2-37
gaggtgcagctgttggagtctgggggaggcttggtacagcctggggggtccctgcgtctctcctgtgcagcctccggattcaccttttctcggtattcgatgatgtgggtccgccaggctccagggaagggtctagagtgggtctcagggattgattctacgggtgttcatacatactacgcagactccgtgaagggccggttcaccatctcccgcgacaattccaagaacacgctgtatctgcaaatgaacagcctgcgtgccgaggacaccgcggtatattactgtgcgaaaggtagttatgctctttggggtcgtgagccgacttttgactactggggtcagggaaccctggtcaccgtctcgagc

SEQ ID NO: 615 - DNA, 369 bp, Artificial Sequence
  Chemically synthesized ABT2-38
gaggtgcagctgttggagtctgggggaggcttggtacagcctggggggtccctgcgtctctcctgtgcagcctccggattcacctttgatcggtatgcgatggggtgggtccgccaggttccagggaagggtctagagtgggtctcaacgattaatgttccgggtacgtttacatactacgcagactccgtgaagggccggttcaccatctcccgcgacaattccaagaacacgctgtatctgcaaatgaacagcctgcgtgccgaggataccgcggtatattactgtgcgaaagggcattttccgcgtggtggggcgattgttccttttgactactggggtcagggaaccctggtcaccgtctcgagc

SEQ ID NO: 616 - DNA, 372 bp, Artificial Sequence
  Chemically synthesized ABT2-39
gaggtgcagctgttggagtctgggggaggcttggtacagcctggggggtccctgcgtctctcctgtgcagcctccggattcacctttagggcttatgatatggggtgggtccgccaggctccagggaagggtctagagtgggtctcagttatttatgcgtggggtactagtacatactacgcagactccgtgaagggccggttcaccatctcccgcgacaattccaagaacacgctgtatctgcaaatgaacagcctgcgtgccgaggacaccgcggtatattactgtgcgaaaattgatcgggatgcgagtctgccgacgggggaggggtttgactactggggtcagggaaccctggtcaccgtctcgagc

SEQ ID NO: 617 - DNA, 369 bp, Artificial Sequence
  Chemically synthesized ABT2-40
gaggtgcagctgttggagtctgggggaggcttggtacagcctggggggtccctgcgtctctcctgtgcagcctccggattcacctttagggcttatgatatggggtgggtccgccaggctccagggaagggtctagagtgggtctcagttatttatgcgtggggtactagtacatactacgcagactccgtgaagggccggttcaccatctcccgcgacaattccaagaacacgctgtatctgcaaatgaacagcctgcgtgccgaggacaccgcggtatattactgtgcgaaaccgtgtgcgatttgtgatacggattcgttgggttttgactactggggtcagggaaccctggtcaccgtctcgagc

SEQ ID NO: 618 - DNA, 369 bp, Artificial Sequence
  Chemically synthesized ABT2-41
gaggtgcagctgttggagtctgggggaggcttggtacagcctggggggtccctgcgtctctcctgtgcagcctccggattcacctttagggcttatgatatggggtgggtccgccaggctccagggaagggtctagagtgggtctcagttatttatgcgtggggtactagtacatactacgcagactccgtgaagggccggttcaccatctcccgcgacaattccaagaacacgctgtatctgcaaatgaacagcctgcgtgccgaggacaccgcggtatattactgtgcgaaaactactgatattaataagaggtggcctactgggtttgactactggggtcagggaaccctggtcaccgtctcgagc

SEQ ID NO: 619 - DNA, 354 bp, Artificial Sequence
  Chemically synthesized ABT2-64
gaggtgcagctgttggagtctgggggaggcttggtacagcctggggggtccctgcgtctctcctgtgcagcctccggattcacctttgatgattatgggatgggttgggtccgccaggctccagggaagggtcttgagtgggtctcacttatttatccgtttggtggggggacatactacgcagactccgtgaagggccggttcaccatctcccgcgacaattccaagaacacgctgtatctgcaaatgaacagcctgcgtgccgaggataccgcggtatattactgtgcgaaagttacgcagactggtaagtttgactactggggtcagggaaccctggtcaccgtctcgagc

SEQ ID NO: 620 - DNA, 369 bp, Artificial Sequence
  Chemically synthesized ABT2-65
gaggtgcagctgttggagtctgggggaggcttggtacagcctggggggtccctgcgtctctcctgtgcagcctccggattcacctttgaggattatcagatggggtgggtccgccaggctccagggaagggtctagagtgggtctcatcgatttcggctatgggtaatcggacatactacgcagactccgtgaagggccggttcaccatctcccgcgacgattccaagaacacgctgtatctgcaaatgaacagcctgcgtgccgaggacaccgcggtatattactgtgcgaaaaatctggttcgtactcagtctaagatgtggatgtttgactactggggtcagggaaccctggtcaccgtctcgagc

SEQ ID NO: 621 - DNA, 369 bp, Artificial Sequence
  Chemically synthesized ABT2-65-1
gaggtgcagctgttggagtctgggggaggcttggtacagcctggggggtccctgcgtctctcctgtgcagcctccggattcacctttgaggattatcagatggggtgggtccgccaggctccagggaagggtctagagtgggtctcatcgatttcggctatgggtaatcggacatactacgcagactccgtgaagggccggttcaccatctcccgcgacgattccaagaacacgctgtatctgcaaatgaagagcctgcgtgccgaggacaccgcggtatattactgtgcgcaaaatctggttcgtactcagtctaagatgtggatgtttgactactggggtcagggaaccctggtcaccgtctcgagc

SEQ ID NO: 622 - DNA, 369 bp, Artificial Sequence
  Chemically synthesized ABT2-65-2
gaggtgcagctgttggagtctgggggaggcttggtacagcctggggggtccctgcgtctctcctgtgcagcctccggattcaccttttctacttataatatgggttgggtccgccaggctccagggaagggtctagagtgggtctcatcgatttcggctatgggtaatcggacatactacgcagactccgtgaagggccggttcaccatctcccgcgacgattccaagaacacgctgtatctgcaaatgaacagcctgcgtgccgaggacaccgcggtatattactgtgcgaataatctggttcgtactcagtctaagatgtggatgtttgactactggggtcagggaaccctggtcaccgtctcgagc

SEQ ID NO: 623 - DNA, 369 bp, Artificial Sequence
  Chemically synthesized ABT2-65-6
gaggtgcagctgttggagtctgggggaggcttggtacagcctggggggtccctgcgtctctcctgtgcagcctccggattcacctttgaggattatcagatggggtgggtccgccaggctccagggaagggtctagagtgggtctcatcgatttcggctatgggtaatcggacatactacgcagactccgtgaagggccggttcaccatctcccgcgacgattccaagaacacgctgtatctgcaaatgaacagcctgcgtgccgaggacaccgcggtatattactgtgcgcaaaatctggttcgtactcagtctaagatgtggatgtttgactactggggtcagggaaccctggtcaccgtctcgagc

SEQ ID NO: 624 - DNA, 369 bp, Artificial Sequence
  Chemically synthesized ABT2-65-7
gaggtgcagctgttggagtctgggggaggcttggtacagcctggggggtccctgcgtctctcctgtgcagcctccggattcacctttgaggattatcagatggggtgggtccgccaggctccagggaagggtctagagtgggtctcatcgatttcggctacgggtaatcggacatactacgcagactccgtgaagggccggttcaccatctcccgcgacgattccaagaacacgctgtatctgcaaatgaacagcctgcgtgccgaggacaccgcggtatattactgtgcgcaaaatctggttaggacgaggattaagatgtggatgtttgactactggggtcagggaaccctggtcaccgtctcgagc

SEQ ID NO: 625 - DNA, 369 bp, Artificial Sequence
  Chemically synthesized ABT2-65-8
gaggtgcagctgttggagtctgggggaggcttggtacagcctggggggtccctgcgtctctcctgtgcagcctccggattcacctttgaggattatcagatggggtgggtccgccaggctccagggaagggtctagagtgggtctcatcgatttcggctatgggtaatcggacatactacgcagactccgtgaagggccggttcaccatctcccgcgacgattccaagaacacgctgtatctgcaaatgaacagcctgcgtgccgaggacaccgcggtttattactgtgcgcaaaatctggttcgtatggatagtaggcgttggatgtttgactactggggtcagggaaccctggtcaccgtctcgagc

SEQ ID NO: 626 - DNA, 369 bp, Artificial Sequence
  Chemically synthesized ABT2-65-9
gaggtgcagctgttggagtctgggggaggcttggtacatcctggggggtccctgcgtctctcctgtgcagcctccggattcacctttcgttggtatccgatgggttgggtccgccaggctccagggaagggtctagagtgggtctcatcgatttcggctatgggtaatcggacatactacgcagactccgtgaagggccggttcaccatctcccgcgacgattccaagaacacgctgtatctgcaaatgaacagcctgcgtgccgaggacaccgcggtatattactgtgcggaaaatctggttcgtactcagtctaagatgtggatgtttgactactggggtcagggaaccctggtcaccgtctcgagc

SEQ ID NO: 627 - DNA, 368 bp, Artificial Sequence
  Chemically synthesized ABT2-65-10
aggtgcagctgtcggagtctgggggaggcttggtacagcctggggggtccctgcgtctctcctgtgcagcctctggattcacctttacggagtataatatgggttgggtccgccaggctccagggaagggtctagagtgggtctcatcgatttcggctatgggtaatcggacatactacgcagactccgtgaagggccggttcaccatctcccgcgacgattccaagaacacgctgtatctgcaaatgaacagcctgcgtgccgaggacaccgcggtatattactgtgcgaataatctggttcgtactcagtctaagatgtggatgtttgactactggggtcagggaaccctggtcaccgtctcgagc

SEQ ID NO: 628 - DNA, 369 bp, Artificial Sequence
  Chemically synthesized ABT2-65-11
gaggtgcagctgttggagtctgggggaggcttggtacagcctggggggtccctgcgtctctcctgtgcagcctccggattcacctttagggcgtatcctatgggttgggtccgccaggctccagggaagggtctagagtgggtctcatcgatttcggctatgggtaatcggacatactacgcagactccgtgaagggccggttcaccatctcccgcgacgattccaagaacacgctgtatctgcaaatgaacagcctgcgtgccgaggacaccgcggtatattactgtgcgaataatctggttcgtactcagtctaagatgtggatgtttgactactggggtcagggaaccctggtcaccgtctcgagc

SEQ ID NO: 629 - DNA, 369 bp, Artificial Sequence
  Chemically synthesized ABT2-65-12
gaggtgcagctgttggagtctgggggaggcttggtacagcctggggggtccctgcgtctctcctgtgcagcctccggattcacctttcgggagtattggatgggttgggtccgccaggctccagggaagggtctagagtgggtctcatcgatttcggctatgggtaatcggacatactacgcagactccgtgaagggccggttcaccatctcccgcgacgattccaagaacacgctgtatctgcaaatgaacagcctgcgtgccgaggacaccgcggtatattactgtgcgaacaatctggttcgtactcagtctaagatgtggatgtttgactactggggtcagggaaccctggtcaccgtctcgagc

SEQ ID NO: 630 - DNA, 369 bp, Artificial Sequence
  Chemically synthesized ABT2-65-13
gaggtgcagctgttggagtctgggggaggcttggtacagcctggggggtccctgcgtctctcctgtgcagcctccggattcacctttagggagtatcagatgggttgggtccgccaggctccagggaagggtctagagtgggtctcatcgatttcggctatgggtaatcggacatactacgcagactccgtgaagggccggttcaccatctcccgcgacgattccaagaacacgctgtatctgcaaatgaacagcctgcgtgccgaggacaccgcggtatattactgtgcgaataatctggttcgtactcagtctaagatgtggatgtttgactactggggtcagggaaccctggtcaccgtctcgagc

SEQ ID NO: 631 - DNA, 369 bp, Artificial Sequence
  Chemically synthesized ABT2-65-14
gaggtgcagctgttggagtccgggggaggcttggtacagcctggggggtccctgcgtctctcctgtgcagcccccggattcacctttccgtattatccgatgggttgggtccgccaggctccagggaagggtctagagtgggtctcatcgatttcggctatgggtaatcggacatactacgcagactccgtgaagggccggttcaccatctcccgcgacgattccaagaacacgctgtatctgcaaatgaacagcctgcgtgccgaggacaccgcggtatattactgtgcgaaaaatctggttcgtactcagtctaagatgtggatgtttgactactggggtcagggaaccctggtcaccgtctcgagc

SEQ ID NO: 632 - DNA, 369 bp, Artificial Sequence
  Chemically synthesized ABT2-65-15
gaggtgcagctgttggagtctgggggaggcttggtacagcctggggggtccctgcgtctctcctgtgcagcctccggattcacctttggtatttatcagatgggttgggtccgccaggctccagggaagggtctagagtgggtctcatcgatttcggctatgggtaatcggacatactacgcagactccgtgaagggccggttcaccatctcccgcgacgattccaagaacacgctgtatctgcaaatgaacagcctgcgtgccgaggacaccgcggtatattactgtgcgcaaaatctggttcgtactcagtctaagatgtggatgtttgactactggggtcagggaaccctggtcaccgtctcgagc

SEQ ID NO: 633 - DNA, 369 bp, Artificial Sequence
  Chemically synthesized ABT2-65-16
gaggtgcagctgttggagtctgggggaggcttggtacagcctggggggtccctgcgtctctcctgtgcagcctccggattcacctttgaggattatcagatggggtgggtccgccaggctccagggaagggtctagagtgggtctcatcgatttcggctatgggtaatcggacatactacgcagactccgtgaagggccggttcaccatctcccgcgacgattccaagaacacgctgtatctgcaaatgaacagcctgcgtgccgaggacaccgcggtatattactgtgcggaaaatctggttaagtggaggagtgcggagtggatgtttgactactggggtcagggaaccctggtcaccgtctcgagc

SEQ ID NO: 634 - DNA, 369 bp, Artificial Sequence
  Chemically synthesized ABT2-65-17
gaggtgcagctgttggagtctgggggaggcttggtacagcctggggggtccctgcgtctctcctgtgtagcctccggattcacctttgaggattatcagatggggtgggtccgccaggctccagggaagggtctagagtgggtctcatcgatttcggctatgggtaatcggacatactacgcagactccgtgaagggccggttcaccatctcccgcgacgattccaagaacacgctgtatctgcaaatgaacagcctgcgtgccgaggacaccgcggtatattactgtgcgcaaaatctggttaggctggggaggtctaggtggatgtttgactactggggtcagggaaccctggtcacagtctcgagc

SEQ ID NO: 635 - DNA, 369 bp, Artificial Sequence
  Chemically synthesized ABT2-65-18
gaggtgcagctgttggagtctgggggaggcttggtacagcctggggggtccctgcgtctctcctgtgcagcctccggattcacctttggggattatcagatggggtgggtccgccaggctccagggaagggtctagagtgggtctcatcgatttcggctatgggtaatcggacatactacgcagactccgtgaagggccggttcaccatctcccgcgacgattccaagaacacgctgtatctgcaaatgaacagcctgcgtgccgaggacaccgcggtatattactgtgcggaaaatctggttcagtggaggattggtgcgtggatgtttgactactggggtcagggaaccctggtcaccgtctcgagc

SEQ ID NO: 636 - DNA, 369 bp, Artificial Sequence
  Chemically synthesized ABT2-65-19
gaggtgcagctgttggagtctgggggaggcttggtacagcctggggggtccctgcgtctctcctgtgcagcctccggattcacctttgaggattatcagatggggtgggtccgccaggctccagggaagggtcaagagtgggtctcatcgatttcggctatgggtaatcggacatactacgcagactccgtgaagggccggttcaccatctcccgcgacgattccaagaacacgctgtatctgcaaatgaacagcctgcgtgccgaggacaccgcggtatattactgtgcgaaaaatctggttttttatgatgcgatgaggtggatgtttgactactggggtcagggaaccctggtcaccgtctcgagc

SEQ ID NO: 637 - DNA, 369 bp, Artificial Sequence
  Chemically synthesized ABT2-65-20
gaggcgcagctgttggagtctgggggaggcttggtacagcctggggggtccctgcgtctctcctgtgcagcctccggattcacctttgaggattatcagatggggtgggtccgccaggctccagggaagggtctagagtgggtctcagttattagtcagttgggttggaatacatactacgcagactccgtgaagggccggttcaccatctcccgcgacgattccaagaacacgctgtatctgcaaatgaacagcctgcgtgccgaggacaccgcggtatattactgtgcgaaaaatctggttcgtactcagtctaagatgtggatgtttgactactggggtcagggaaccctggtcaccgtctcgagc

SEQ ID NO: 638 - DNA, 369 bp, Artificial Sequence
  Chemically synthesized ABT2-65-21
gaggtgcagctgttggagtctgggggaggcttggtacagcctggggggtccctgcgtctctcctgtgcagcctccggattcacctttgaggattatcagatggggtgggtccgccaggctccagggaagggtctagagtgggtctcagctatttcgcagctgggttggcatacatactacgcagactccgtgaagggccggttcaccatctcccgcgacgattccaagaacacgctgtatctgcaaatgaacagcctgcgtgccgaggacaccgcggtatattactgtgcgaaaaatctggttcgtactcagtctaagatgtggatgtttgactactggggtcagggaaccctggtcaccgtctcgagc

SEQ ID NO: 639 - DNA, 369 bp, Artificial Sequence
  Chemically synthesized ABT2-65-22
gaggtgcagctgttggagtctgggggaggcttggtacagcctggggggtccctgcgtctctcctgtgcagcctccggattcacctttcttgggtatccgatgggttgggtccgccaggctccagggaagggtctagagtgggtctcatcgatttcggctatgggtaatcggacatactacgcagactccgtgaagggccggttcaccatctctcccgacgattccaagaacacgctgtatctgcaaatgaacagcctgcgtgccgaggacaccgcggtatattactgtgcgaaaaatctggttcgtactcagtctaagatgtggatgtttgactactggggtcagggaaccctggtcaccgtctcgagc

SEQ ID NO: 640 - DNA, 369 bp, Artificial Sequence
  Chemically synthesized ABT2-65-23
gaggtgcagctgttggagtctgggggaggcttggtacagcctggggagtccctgcgtctctcctgtgcagcctccggattcacctttaaggtgtatcctatgggttgggtccgccaggctccagggaagggtctagagtgggtctcatcgatttcggctatgggtaatcggacatactacgcagactccgtgaagggccggttcaccatctcccgcgacgattccaagaacacgctgtatctgcaaatgaacagcctgcgtgccgaggacaccgcggtatattactgtgcgaaaaatctggttcgtactcagtctaagatgtggatgtttgactactggggtcagggaaccctggtcaccgtctcgagc

SEQ ID NO: 641 - DNA, 369 bp, Artificial Sequence
  Chemically synthesized ABT2-65-24
gaggtgcagctgttggagtctgggggaggcttggtacagcctggggggtccctgcgtctctcctgtgcagcctccggattcacctttgcggcttatcagatggggtgggtccgccaggctccagggaagggtctagagtgggtctcatcgatttcggctatgggtaatcggacatactacgcagactccgtgaagggccggttcaccatctcccgcgacgattccaagaacacgctgtatctgcaaatgaacagcctgcgtgccgaggacaccgcggtatattactgtgcgcaaaatctggttcgtactcagtctaagatgtggatgtttgactactggggtcagggaaccctggtcaccgtctcgagc

SEQ ID NO: 642 - DNA, 369 bp, Artificial Sequence
  Chemically synthesized ABT2-65-25
gaggtgcagctgttggagtctgggggaggcttggtacagcctggggggtccctgcgtctctcctgtgcagcctccggattcacctttgaggattatcagatggggtgggtccgccaggctccagggaagggtctagagtgggtctcatcgatttcggctatgggtaatcggacatactacgcagactccgtgaagggccggttcaccatctcccgcgacgattccaagaacacgctgtatctgcaaatgaacagcctgcgtgccgaggacaccgcggtatattactgtgcgcaaaatctggttcgttatcgtagttattattggatgtttgactactggggtcagggaaccctggtcaccgtcttgagc

SEQ ID NO: 643 - DNA, 369 bp, Artificial Sequence
  Chemically synthesized ABT2-65-26
gaggtgcagctgttggagtctgggggaggcttggtacagcctggggggtccctgcgtctctcctgtgcagcctccggattcacctttgaggattatcagatggggtgggtccgccaggctccagggaagggtctagagtgggtctcatcgatttcggctatgggtaatcggacatactacgcagactccgtgaagggccggttcaccatctcccgcgacgattccaagaacacgctgtatctgcaaatgaacagcctgcgtgccgaggacaccgcggtatattactgtgcgcaaaatctggttctggtgcgttcgggttattggatgtttgactactggggtcagggaaccctggtcaccgtctcgagc

SEQ ID NO: 644 - DNA, 369 bp, Artificial Sequence
  Chemically synthesized ABT2-65-27
gaggtgcagctgttggagtctgggggaggcttggtacagcctggggggtccctgcgtctctcctgtgcagcctccggattcacctttgaggattatcagatggggtgggtccgccaggctccagggaagggtctagagtgggtctcatcgatttcggctatgggtaatcggacatactacgcagactccgtgaagggccggttcaccatctcccgcgacgattccaagaacacgctgtatctgcaaatgaacagcctgcgtgccgaggacaccgcggtatattactgtgcggaaaatctggttcgtctgtggaagggtaggtggatgtttgactactggggtcagggaaccctggtcaccgtctcgagc

SEQ ID NO: 645 - DNA, 369 bp, Artificial Sequence
  Chemically synthesized ABT2-65-28
gaggtgcagctgttggagtctgggggaggcttggtacagcctggggggtccctgcgtctctcctgtgcagcctccggattcacctttgaggattatcagatggggtgggtccgccaggctccagggaagggtctagagtgggtctcatcgatttcggctatgggtaatcggacatactacgcagactccgtgaagggccggttcaccatctcccgcgacgattccaagaacacgctgtatctgcaaatgaacagcctgcgtgccgaggacaccgcggtatattactgtgcgcaaaatctggttcagtttcgtcgttctcagtggatgtttgattactggggtcagggaaccctggtcaccgtctcgagc

SEQ ID NO: 646 - DNA, 369 bp, Artificial Sequence
  Chemically synthesized ABT2-65-29
gaggtgcagctgttggagtctgggggaggcttggtacagcctggggggtccctgcgtctctcctgtgcagcctccggattcacctttgaggattatcagatggggtgggtccgccaggctccagggaagggtctagagtgggtctcatcgatttcggctatgggtaatcggacatactacgcagactccgtgaagggccggttcaccatctcccgcgacgattccaagaacacgctgtatctgcaaatgaacagcctgcgtgccgaggacaccgcggtatattactgtgcgcaaaatctggttttggttcgggttgggtggtggatgtttgactactggggtcagggaaccctggtcaccgtctcgagc

SEQ ID NO: 647 - DNA, 369 bp, Artificial Sequence
  Chemically synthesized ABT2-65-30
gaggtgcggctgttggagtctgggggaggcttggtacagcctggggggtccctgcgtctctcctgtgcagcctccggattcacctttgaggattatcagatggggtgggtccgccaggctccagggaagggtctagagtgggtctcatcgatttcggctatgggtaatcggacatactacgcagactccgtgaagggccggttcaccatctcccgcgacgattccaagaacacgctgtatctgcaaatgaacagcctgcgtgccgaggacaccgcggtatattactgtgcgcaaaatctggttcgtctgaataggagggattggatgtttgactactggggtcagggaaccctggtcaccgtctcgagc

SEQ ID NO: 648 - DNA, 369 bp, Artificial Sequence
  Chemically synthesized ABT2-65-31
gaggtgcagctgttggagtctgggggaggcttggtacagcctggggggtccctgcgtctctcctgtgcagcctccggattcacctttgaggattatcagatggggtgggtccgccaggctccagggaagggtctagagtgggtctcatcgatttcggctatgggtaatcggacatactacgcagactccgtgaagggccggttcaccatctcccgcgacgattccaagaacacgctgtatctgcaaatgaacagcctgcgtgccgaggacaccgcggtatattactgtgcgcaaaatctggttaagattatgaggttgaagtggatgtttgactactggggtcagggaaccctggtcaccgtctcgagc

SEQ ID NO: 649 - DNA, 369 bp, Artificial Sequence
  Chemically synthesized ABT2-65-32
gaggtgcagctgttggagtctgggggaggcttggtacagcctggggggtccctgcgtctctcctgtgcagcctccggattcacctttgaggattatcagatggggtgggtccgccaggctccagggaagggtctagagtgggtctcatcgatttcggctatgggtaatcggacatactacgcagactccgtgaagggccggttcaccatctcccgcgacgattccaagaacacgctgtatctgcaaatgaacagcctgcgtgccgaggacaccgcggtatattactgtgcgcaaaatctggttgcggtgtcgcggggtcggtggatgtttgactactggggtcagggaaccctggtcaccgtctcgagc

SEQ ID NO: 650 - DNA, 369 bp, Artificial Sequence
  Chemically synthesized ABT2-65-33
gaggtgcagctgttggagtctgggggaggcttggtacagcctggggggtccctgcgtctctcctgtgcagcctccggattcacctttgaggattatcagatggggtgggtccgccaggctccagggaagggtctagagtgggtctcatcgatttcggctatgggtaatcggacatactacgcagactccgtgaagggccggttcaccatctcccgcgacgattccaagaacacgctgtatctgcaaatgaacagcctgcgtgccgaggacaccgcggtatattactgtgcgcaaaatctggttaggtatatgaagtctcagtggatgtttgactactggggtcagggaaccctggtcaccgtctcgagc

SEQ ID NO: 651 - DNA, 369 bp, Artificial Sequence
  Chemically synthesized ABT2-65-34
gaggtgcagctgttggagtctgggggaggcttggtacagcctggggggtccctgcgtctctcctgtgcagcctccggattcacctttgaggattatcagatggggtgggtccgccaggctccagggaagggtctagagtgggtctcatcgatttcggctatgggtaatcggacatactacgcagactccgtgaagggccggttcaccatctcccgcgacgattccaagaacacgctgtatctgcaaatgaacagcctgcgtgccgaggacaccgcggtatattactgtgcgcaaaatctggttcgtactaggtctaagaggtggatgtttgactactggggtcagggaaccctggtcaccgtctcgagc

SEQ ID NO: 652 - DNA, 369 bp, Artificial Sequence
  Chemically synthesized ABT2-65-35
gaggtgcagctgttggagtctgggggaggcttggtacagcctggggggtccctgcgtctctcctgtgtagcctccggattcacctttgaggattatcagatggggtgggtccgccaggctccagggaagggtctagagtgggtctcatcgatttcggctatgggtaatcggacatactacgcagactccgtgaagggccggttcaccatctcccgcgacgattccaagaacacgctgtatctgcaaatgaacagcctgcgtgccgaggacaccgcggtatattactgtgcgcaaaatctggttaggctgaggaggtctaggtggatgtttgactactggggtcagggaaccctggtcacagtctcgagc

SEQ ID NO: 653 - DNA, 369 bp, Artificial Sequence
  Chemically synthesized ABT2-65-36
gaggtgcggctgttggagtctgggggaggcttggtacagcctggggggtccctgcgtctctcctgtgcagcctccggattcacctttgaggattatcagatggggtgggtccgccaggctccagggaagggtctagagtgggtctcatcgatttcggctatgggtaatcggacatactacgcagactccgtgaagggccggttcaccatctcccgcgacgattccaagaacacgctgtatctgcaaatgaacagcctgcgtgccgaggacaccgcggtatattactgtgcgcaaaatctggttcgtactcagtctaagatgtggatgtttgactactggggtcagggaaccctggtcaccgtctcgagc

SEQ ID NO: 654 - DNA, 369 bp, Artificial Sequence
  Chemically synthesized ABT2-65-37
gaggtgcagctgttggagtctgggggaggcttagtacagcctggggggtccctgcgtctctcctgtgcagcctccggattcacctttgcggattatcagatggggtgggtccgccaggctccagggaagggtctagagtgggtctcatcgatttcggctatgggtaatcggacatactacgcagactccgtgaagggccggttcaccatctcccgcgacgattccaagaacacgctgtatctgcaaatgaacagcctgcgtgccgaggacaccgcggtatattactgtgcgcaaaatctggttcgtactcagtctaagatgtggatgtttgactactggggtcagggaaccctggtcaccgtctcgagc

SEQ ID NO: 655 - DNA, 369 bp, Artificial Sequence
  Chemically synthesized ABT2-65-38
gaggtgcagctgttggagtctgggggaggcttggtacagcctggggggtccctgcgtctctcctgtgcagcctccggattcacctttgaggattatcagatggggtgggtccgccaggctccagggaagggtctagagtgggtctcatcgatttcggctatgggtaatcggacatactacgcagactccgtgaagggccggttcaccatctaccgcgacgattccaagaacacgctgtatctgcaaatgaacagcctgcgtgccgaggacaccgcggtatattactgtgcgcaaaatctggttcgtactcagtctaagatgtggatgtttgactactggggtcagggaaccctggtcaccgtctcgagc

SEQ ID NO: 656 - DNA, 369 bp, Artificial Sequence
  Chemically synthesized ABT2-65-39
gaggtgcagctgttggagtctgggggaggcttggtacagcctggggggtccctgcgtctctcctgtgcagcctccggattcacctttgaggattatcagatggggtgggtccgccaggctccagggaagggtctagagtgggtctcatcgatttcggctatgggtaatcggacatactacgcagactccgtgaagggccggttcaccatctcccgcgacgattccaagaacacgctgtatctgcaaatgaacagcctgcgtgccgaggacaccgcggtatattactgtgcgggaaatctggttcgtactcagtctaagatgtggatgtttgactactggggtcagggaaccctggtcaccgtctcgagc

SEQ ID NO: 657 - DNA, 369 bp, Artificial Sequence
  Chemically synthesized ABT2-65-40
gaggtgcagctgttggagtctgggggaggcttggtacagcctggggggtccctgcgtctctcctgtgcagcctccggattcacctttgaggattatcagatggggtgggtccgccaggctccagggaagggtctagagtgggtctcatcgatttcggctatgggtaatcggacatactacgcagactccgtgaagggccggttcaccatctcccgcgacgattccaagaacacgctgtatctgcaaatgaacagcctgcgtgccgaggacaccgcggtatattactgtgcgcaaaatctggttaagacgtttaagagtaggtggatgtttgactactggggtcagggaaccctggtcaccgtctcgagc

SEQ ID NO: 658 - DNA, 369 bp, Artificial Sequence
  Chemically synthesized ABT2-65-41
gaggtgcagctgttggagtctgggggaggcttggtacagcctggggggtccctgcgtctctcctgtgcagcctccggattcacctttgaggattatcagatggggtgggtccgccaggctccagggaagggtctagagtgggtctcatcgatttcggctatgggtaatcggacatactacgcagactccgtgaagggccggttcaccatctcccgcgacgattccaagaacacgctgtatctgcaaatgaacagcctgcgtgccgaggacaccgcggtatattactgtgcgaaatgggtgactcgtactcagtctaagctggggctgtttgactactggggtcagggaaccctggtcaccgtctcgagc

SEQ ID NO: 659 - DNA, 369 bp, Artificial Sequence
  Chemically synthesized ABT2-65-42
gaggtgcagctgttggagtctgggggaggcttggtacagcctggggggtccctgcgtctctcctgtgcagcctccggattcacctttgaggattatcagatggggtgggtccgccaggctccagggaagggtctagagtgggtctcatcgatttcggctatgggtaatcggacatactacgcagactccgtgaagggccggttcaccatctcccgcgacgattccaagaacacgctgtatctgcaaatgaacagcctgcgtgccgaggacaccgcggtatattactgtgcgaaatgggtgactcgtactcagtctaagttgggtcggtttgactactggggtcagggaaccctggtcaccgtctcgagc

SEQ ID NO: 660 - DNA, 369 bp, Artificial Sequence
  Chemically synthesized ABT2-65-43
gaggtgcagctgttggagtctgggggaggcttggtacagcctggggggtccctgcgtctctcctgtgcagcctccggattcacctttgaggattatcagatggggtgggtccgccaggctccagggaagggtctagagtgggtctcatcgatttcggctatgggtaatcggacatactacgcagactccgtgaagggccggttcaccatctcccgcgacgattccaagaacacgctgtatctgcaaatgaacagcctgcgtgccgaggacaccgcggtatattactgtgcgaaatggaggtatcgtattcagtctaagctggggctgtttgactactggggtcagggaaccctggtcaccgtctcgagc

SEQ ID NO: 661 - DNA, 369 bp, Artificial Sequence
  Chemically synthesized ABT2-65-44
gaggtgcagctgttggagtctgggggaggcttggtacagcctggggggtccctgcgtctctcctgtgcagcctccggattcacctttgaggattatcagatggggtgggtccgccaggctccagggaagggtctagagtgggtctcatcgatttcggctatgggtaatcggacatactacgcagactccgtgaagggccggttcaccatctcccgcgacgattccaagaacacgctgtatctgcaaatgaacagcctgcgtgccgaggacaccgcggtatattactgtgcgaaatggttgggtcgtattcagtctaagttgggtctgtttgactactggggtcagggaaccctggtcaccgtctcgagc

SEQ ID NO: 662 - DNA, 369 bp, Artificial Sequence
  Chemically synthesized ABT2-65-45
gaggtgcagctgttggagtctgggggaggcttggtacagcctggggggtccctgcgtctctcctgtgcagcctccggattcacctttgaggattatcagatggggtgggtccgccaggctccagggaagggtctagagtgggtctcatcgatttcggctatgggtaatcggacatactacgcagactccgtgaagggccggttcaccatctcccgcgacgattccaagaacacgctgtatctgcaaatgaacagcctgcgtgccgaggacaccgcggtatattactgtgcgaaatggcgtcggcgtactcagtctaagctggggtattttgactactggggtcagggaaccctggtcaccgtctcgagc

SEQ ID NO: 663 - DNA, 369 bp, Artificial Sequence
  Chemically synthesized ABT2-65-46
gaggtgcagctgttggagtctgggggaggcttggtacagcctggggggtccctgcgtctctcctgtgcagcctccggattcacctttgaggattatcagatggggtgggtccgccaggctccagggaagggtttagagtgggtctcatcgatttcggctatgggtaatcggacatactacgcagactccgtgaagggccggttcaccatctcccgcgacgattccaagaacacgctgtatctgcaaatgaacagcctgcgtgccgaggacaccgcggtatattactgtgcgaaatggttgacgcgtactcagtctaagttggggtattttgactactggggtcaaggaaccctggtcaccgtctcgagc

SEQ ID NO: 664 - DNA, 369 bp, Artificial Sequence
  Chemically synthesized ABT2-65-47
gaggtgcagctgttggagtctgggggaggcttggtacagcctggggggtccctgcgtctctcctgtgcagcctccggattcacctttgaggattatcagatggggtgggtccgccaggctccagggaagggtctagagtgggtctcatcgatttcggctatgggtaatcggacatactacgcagactccgtgaagggccggttcaccatctcccgcgacgattccaagaacacgctgtatctgcaaatgaacagcctgcgtgccgaggacaccgcggtatattactgtgcgaaatggaggaagcgtactcagtctaagcttggttattttgactactggggtcagggaaccctggtcaccgtctcgagc

SEQ ID NO: 665 - DNA, 369 bp, Artificial Sequence
  Chemically synthesized ABT2-65-48
gaggtgcagctgttggagtctgggggaggcttggtacagcctggggggtccctgcgtctctcctgtgcagcctccggattcacctttgaggattatcagatggggtgggtccgccaggctccagggaagggtctagagtgggtctcatcgatttcggctatgggtaatcggacatactacgcagactccgtgaagggccggttcaccatctcccgcgacgattccaagaacacgctgtatctgcaaatgaacagcctgcgtgccgaggacaccgcggtatattactgtgcgaaatggcagatgcgtactcagtctaagcttggttattttgactactggggtcagggaaccctggtcaccgtctcgagc

SEQ ID NO: 666 - DNA, 369 bp, Artificial Sequence
  Chemically synthesized ABT2-65-49
ggggtgcagctgttggagtctgggggaggcttggtacagcctggggggtccctgcgtctctcctgtgcagcctccggattcacctttgaggattatcagatggggtgggtccgccaggctccagggaagggtctagagtgggtctcatcgatttcggctatgggtaatcggacatactacgcagactccgtgaagggccggttcaccatctcccgcgacgattccaagaacacgctgtatctgcaaatgaacagcctgcgtgccgaggacaccgcggtatattactgtgcgcaaaatctggttcgtactcagtctaagatgtggatgtttgactactggggtcagggaaccctggtcaccgtctcgagc

SEQ ID NO: 667 - DNA, 369 bp, Artificial Sequence
  Chemically synthesized ABT2-65-50
gaggtgcagctgttggagtctgggggaggcttggtacagcctggggggtccctgcgtctctcctgtgcagcctccggattcacctttctgacgtatccgatggggtgggtccgccaggctccagggaagggtctagagtgggtctcatcgatttcggctatgggtaatcggacatactacgcagactccgtgaagggccggttcaccatctcccgcgacgattccaagaacacgctgtatctgcaaatgaacagcctgcgtgccgaggacaccgcggtatattactgtgcgaaaaatctggttcgtactcagtctaagatgtggatgtttgactactggggtcggggaaccctggtcaccgtctcgagc

SEQ ID NO: 668 - DNA, 369 bp, Artificial Sequence
  Chemically synthesized ABT2-65-52
gaggtgcaggtgttggagtctgggggaggcttggtacagcctggggggtccctgcgtctctcctgtgcagcctccggattcaccttttatagttatcctatgggttgggtccgccaggctccagggaagggtctagagtgggtctcatcgatttcggctatgggtaatcggacatactacgcagactccgtgaagggccggttcaccatctcccgcgacgattccaagaacacgctgtatctgcaaatgaacagcctgcgtgccgaggacaccgcggtatattactgtgcgaaaaatctggttcgtactcagtctaagatgtggatgtttgactactggggtcagggaaccctggtcaccgtctcgagc

SEQ ID NO: 669 - DNA, 369 bp, Artificial Sequence
  Chemically synthesized ABT2-65-53
gaggtgcagctgttggagtctgggggaggcttggtacagcctggggggtccctgcgtctctcctgtgcagcctccggattcaccttttatgtttatcctatgggttgggtccgccaggctccagggaagggtctagagtgggtctcatcgatttcggctatgggtaatcggacatactacgcagactccgtgaagggccggttcaccatctcccgcgacgattccaagaacacgctgtatctgcaaatgaacagcctgcgtgctgaggacaccgcggtatattactgtgcgataaatctggttcgtactcagtctaagatgtggatgtttgactactggggtcagggaaccctggtcaccgtctcgagc

SEQ ID NO: 670 - DNA, 369 bp, Artificial Sequence
  Chemically synthesized ABT2-65-54
gaggtgcagctgttggagtctgggggaggcttggtacagcctggggggtccctgcgtctctcctgtgcagcctccggattcacctttgaggattatcagatggggtgggtccgccaggctccagggaagggtctagagtgggtctcaactattagtcagttgggttggatgacatactacgcagactccgtgaagggccggttcaccatctcccgcgacgattccaagaacacgctgtatctgcaaatgaacagcctgcgtgccgaggacaccgcggtatattactgtgcgaaaaatctggttcgtactcagtctaagatgtggatgtttgactactggggtcagggaaccctggtcaccgtctcgagc

SEQ ID NO: 671 - DNA, 369 bp, Artificial Sequence
  Chemically synthesized ABT2-65-55
gaggtgcagctgttggagtctgggggaggcttggcacagcctggggggtccctgcgtctctcctgtgcagcctccggattcacctttgaggattatcagatggggtgggtccgccaggctccagggaagggtctagagtgggtctcagcgattactcagcttggttggtatacatactacgcagactccgtgaagggccggttcaccatctcccgcgacgattccaagaacacgctgtatctgcaaatgaacagcctgcgtgccgaggacaccgcggtatattactgtgcgaaaaatctggttcgtactcagtctaagatgtggatgtatgactactggggtcagggaaccctggtcaccgtctcgagc

SEQ ID NO: 672 - DNA, 369 bp, Artificial Sequence
  Chemically synthesized ABT2-65-56
gaggtgcagttgttggagtctgggggaggcttggtacagcctggggggtccctgcgtctctcctgtgcagcctccggattcacctttcctgagtattatatggggtgggtccgccaggctccagggaagggtctagagtgggtctcatcgatttcggctatgggtaatcggacatactacgcagactccgtgaagggccggttcaccatctcccgcgacgattccaagaacacgctgtatctgcaaatgaacagcctgcgtgccgaggacaccgcggtatattactgtgcgcaaaatctggttaggctggggaggtctaggtggatgtttgactactggggtcagggaaccctggtcacagtctcgagc

SEQ ID NO: 673 - DNA, 369 bp, Artificial Sequence
  Chemically synthesized ABT2-65-57
gaggtgcagctgttggagtctgggggaggcttggtacagcctggggggtccctgcgtctctcctgtgcagcctccggattcacctttagggagtatggtatggggtgggtccgccaggctccagggaagggtctagagtgggtctcatcgatttcggctatgggtaatcggacatactacgcagactccgtgaagggccggttcaccatctcccgcgacgattccaagaacacgctgtatctgcaaatgaacagcctgcgtgccgaggacaccgcggtatattactgtgcgcaaaatctggttaggctggggaggtctaggtggatgtttgactactggggtcagggaaccctggtcacagtctcgagc

SEQ ID NO: 674 - DNA, 369 bp, Artificial Sequence
  Chemically synthesized ABT2-65-58
gaggtgcagctgttggagtctgggggaggcttggtacagcctggggggtccctgcgtctctcctgtgcagcctccggattcacctttgttatttatccgatggggtgggtccgccaggctccagggaagggtctagagtgggtctcatcgatttcggctatgggtaatcggacatactacgcagactccgtgaagggccggttcaccatctcccgcgacgattccaagaacacgctgtatctgcaaatgaacagcctgcgtgccgaggacaccgcggtatattactgtgcgcaaaatctggttaggctggggaggtctaggtggatgtttgactactggggtcagggaaccctggtcacagtctcgagc

SEQ ID NO: 675 - DNA, 369 bp, Artificial Sequence
  Chemically synthesized ABT2-65-59
gaggtgcagctgttggagtctgggggaggcttggtacagcctggggggtccctgcgtctctcctgtgcagcctccggattcacctttgatacttattggatggggtgggtccgccaggctccagggaagggtctagagtgggtctcatcgatttcggctatgggtaatcggacatactacgcagactccgtgaagggccggttcaccatctcccgcgacgattccaagaacacgctgtatctgcaaatgaacagcctgcgtgccgaggacaccgcggtatattactgtgcgcaaaatctggttaggctggggaggtctaggtggatgtttgactactggggtcagggaaccctggtcacagtctcgagc

SEQ ID NO: 676 - DNA, 369 bp, Artificial Sequence
  Chemically synthesized ABT2-65-60
gaggtgcagctgttggagtctgggggaggcttggtacagcctggggggtccctgcgtctctcctgtgcagcctccggattcacctttagtatgtatcagatggggtgggtccgccaggctccagggaagggtctagagtgggtctcatcgatttcggctatgggtaatcggacatactacgcagactccgtgaagggccggttcaccatctcccgcgacgattccaagaacacgctgtatctgcaaatgaacagcctgcgtgccgaggacaccgcggtatattactgtgcgcaaaatctggttaggctggggaggtctaggtggatgtttgactactggggtcagggaaccctggtcacagtctcgagc

SEQ ID NO: 677 - DNA, 369 bp, Artificial Sequence
  Chemically synthesized ABT2-65-61
gaggtgcagctgttggagtctgggggaggcttggtacagcctggggggtccctgcgtctctcctgtgcagcctccggattcacctttagggagtatcagatggggtgggtccgccaggctccagggaagggtctagagtgggtctcatcgatttcggctatgggtaatcggacatactacgcagactccgtgaagggccggttcaccatctcccgcgacgattccaagaacacgctgtatctgcaaatgaacagcctgcgtgccgaggacaccgcggtatattactgtgcgcaaaatctggttaggctggggaggtctaggtggatgtttgactactggggtcagggaaccctggtcacagtctcgagc

SEQ ID NO: 678 - DNA, 369 bp, Artificial Sequence
  Chemically synthesized ABT2-65-62
gaggtgcagctgttggagtctgggggaggcttggtacagcctggggggtccctgcgtctctcctgtgcagcctccggattcacctttcgggagtattttatggggtgggtccgccaggctccagggaagggtctagagtgggtctcatcgatttcggctatgggtaatcggacatactacgcagactccgtgaagggccggttcaccatctcccgcgacgattccaagaacacgctgtatctgcaaatgaacagcctgcgtgccgaggacaccgcggtatattactgtgcgcaaaatctggttaggctggggaggtctaggtggatgtttgactactggggtcagggaaccctggtcacagtctcgagc

SEQ ID NO: 679 - DNA, 369 bp, Artificial Sequence
  Chemically synthesized ABT2-65-63
gaggtgcagctgttggagtctgggggaggcttggtacagcctggggggtccctgcgtctctcctgtgcagcctccggattcacctttgatggttataatatggggtgggtccgccaggctccagggaagggtctagagtgggtctcatcgatttcggctatgggtaatcggacatactacgcagactccgtgaagggccggttcaccatctcccgcgacgattccaagaacacgctgtatctgcaaatgaacagcctgcgtgccgaggacaccgcggtatattactgtgcgcaaaatctggttaggctggggaggtctaggtggatgtttgactactggggtcagggaaccctggtcacagtctcgagc

SEQ ID NO: 680 - DNA, 369 bp, Artificial Sequence
  Chemically synthesized ABT2-65-64
gaggtgcagctgttggagtctgggggaggcttggtacagcctggggggtccctgcgtctctcctgtgtagcctccggattcacctttgaggattatcagatggggtgggtccgccaggctccagggaagggtctagagtgggtctcaagtattaggactcctggtaagtttacatactacgcagactccgtgaagggccggttcaccatctcccgcgacgattccaagaacacgctgtatctgcaaatgaacagcctgcgtgccgaggacaccgcggtatattactgtgcgcaaaatctggttaggctggggaggtctaggtggatgtttgactactggggtcagggaaccctggtcacagtctcgagc

SEQ ID NO: 681 - DNA, 369 bp, Artificial Sequence
  Chemically synthesized ABT2-65-65
gaggtgcagctgttggagtctgggggaggcttggtacagcctggggggtccctgcgtctctcctgtgtagcctccggattcacctttgaggattatcagatggggtgggtccgccaggctccagggaagggtctagagtgggtctcatctattagtgtggctggtaagcctacatactacgcagactccgtgaagggccggttcaccatctcccgcgacgattccaagaacacgctgtatctgcaaatgaacagcctgcgtgccgaggacaccgcggtatattactgtgcgcaaaatctggttaggctggggaggtctaggtggatgtttgactactggggtcagggaaccctggtcacagtctcgagc

SEQ ID NO: 682 - DNA, 369 bp, Artificial Sequence
  Chemically synthesized ABT2-65-66
gaggtgcagctgttggagtctgggggaggcttggtacagcctggggggtccctgcgtctctcctgtgtagcctccggattcacctttgaggattatcagatggggtgggtccgccaggctccagggaagggtctagagtgggtctcaactattgcgctgctgggtgggcctacatactacgcagactccgtgaagggccggttcaccatctcccgcgacgattccaagaacacgctgtatctgcaaatgaacagcctgcgtgccgaggacaccgcggtatattactgtgcgcaaaatctggttaggctggggaggtctaggtggatgtttgactactggggtcagggaaccctggtcacagtctcgagc

SEQ ID NO: 683 - DNA, 369 bp, Artificial Sequence
  Chemically synthesized ABT2-65-67
gaggtgcagctgttggagtctgggggaggcttggtacagcctggggggtccctgcgtctctcctgtgtagcctccggattcacctttgaggattatcagatggggtgggtccgccaggctccagggaagggtctagagtgggtctcaacgattcaggtttttggtggtaagacatactacgcagactccgtgaagggccggttcaccatctcccgcgacgattccaagaacacgctgtatctgcaaatgaacagcctgcgtgccgaggacaccgcggtatattactgtgcgcaaaatctggttaggctggggaggtctaggtggatgtttgactactggggtcagggaaccctggtcacagtctcgagc

SEQ ID NO: 684 - DNA, 369 bp, Artificial Sequence
  Chemically synthesized ABT2-65-68
gaggtgcagctgttggagtctgggggaggcttggtacagcctggggggtccctgcgtctctcctgtgtagcctccggattcacctttgaggattatcagatggggtgggtccgccaggctccagggaagggtctagagtgggtctcaagtattcggccgactggtccgtttacatactacgcagactccgtgaagggccggttcaccatctcccgcgacgattccaagaacacgctgtatctgcaaatgaacagcctgcgtgccgaggacaccgcggtatattactgtgcgcaaaatctggttaggctggggaggtctaggtggatgtttgactactggggtcagggaaccctggtcacagtctcgagc

SEQ ID NO: 685 - DNA, 369 bp, Artificial Sequence
  Chemically synthesized ABT2-65-69
gaggtgcagctgttggagtctgggggaggcttggtacagcctggggggtccctgcgtctctcctgtgtagcctccggattcacctttgaggattatcagatggggtgggtccgccaggctccagggaagggtctagagtgggtctcatctatttatagtcgtggtacgcctacatactacgcagactccgtgaagggccggttcaccatctcccgcgacgattccaagaacacgctgtatctgcaaatgaacagcctgcgtgccgaggacaccgcggtatattactgtgcgcaaaatctggttaggctggggaggtctaggtggatgtttgactactggggtcagggaaccctggtcacagtctcgagc

SEQ ID NO: 686 - DNA, 369 bp, Artificial Sequence
  Chemically synthesized ABT2-65-70
gaggtgcagctgttggagtctgggggaggcttggtacagcctggggggtccctgcgtctctcctgtgtagcctccggattcacctttgaggattatcagatggggtgggtccgccaggctccagggaagggtctagagtgggtctcatcgattccgagggtgggtatgcggacatactacgcagactccgtgaagggccggttcaccatctcccgcgacgattccaagaacacgctgtatctgcaaatgaacagcctgcgtgccgaggacaccgcggtatattactgtgcgcaaaatctggttaggctggggaggtctaggtggatgtttgactactggggtcagggaaccctggtcacagtctcgagc

SEQ ID NO: 687 - DNA, 369 bp, Artificial Sequence
  Chemically synthesized ABT2-65-71
gaggtgcagctgttggagtctgggggaggcttggtacagcctggggggtccctgcgtctctcctgtatagcctccggattcacctttgaggattatcagatggggtgggtccgccaggctccagggaagggtctagagtgggtctcagctattcggaatgttggtagggctacatactacgcagactccgtgaagggccggttcaccatctcccgcgacgattccaagaacacgctgtatctgcaaatgaacagcctgcgtgccgaggacaccgcggtatattactgtgcgcaaaatctggttaggctggggaggtctaggtggatgtttgactactggggtcagggaaccctggtcacagtctcgagc

SEQ ID NO: 688 - DNA, 369 bp, Artificial Sequence
  Chemically synthesized ABT2-65-72
gaggtgcagctgttggagtctgggggaggcttggtacagcctggggggtccctgcgtctctcctgtgtagcctccggattcacctttgaggattatcagatggggtgggtccgccaggctccagggaagggtctagagtgggtctcagtgattggttttcctggtaggctgacatactacgcagactccgtgaagggccggttcaccatctcccgcgacgattccaagaacacgctgtatctgcaaatgaacagcctgcgtgccgaggacaccgcggtatattactgtgcgcaaaatctggttaggctggggaggtctaggtggatgtttgactactggggtcagggaaccctggtcacagtctcgagc

SEQ ID NO: 689 - DNA, 369 bp, Artificial Sequence
  Chemically synthesized ABT2-65-73
gaggtgcagctgttggagtctgggggaggcttggtacagcctggggggtccctgcgtctctcctgtgtagcctccggattcacctttgaggattatcagatggggtgggtccgccaggctccagggaagggtctagagtgggtctcatcgattcgggcggttggtgttggtacatactacgcagactccgtgaagggccggttcaccatctcccgcgacgattccaaggacacgctgtatctgcaaatgaacagcctgcgtgccgaggacaccgcggtatattactgtgcgcaaaatctggttaggctggggaggtctaggtggatgtttgactactggggtcagggaaccctggtcacagtctcgagc

SEQ ID NO: 690 - DNA, 369 bp, Artificial Sequence
  Chemically synthesized ABT2-65-74
gaggtgcagctgttggagtctgggggaggcttggtacagcctggggggtccctgcgtctctcctgtgcagcctccggattcacctttcagcattattatatgggttgggtccgccaggctccagggaagggtctagagtgggtctcatcgatttcggctatgggtaatcggacatactacgcagactccgtgaagggccggttcaccatctcccgcgacgattccaagaacacgctgtatctgcaaatgaacagcctgcgtgccgaggacaccgcggtatattactgtgcgcaaaatctggttcgtactcagtctaagatgtggatgtttgactactggggtcagggaaccctggtcaccgtctcgagc

SEQ ID NO: 691 - DNA, 369 bp, Artificial Sequence
  Chemically synthesized ABT2-65-75
gaggtgcagctgttggagtctgggggaggcttggtacagcatggggggtccctgcgtctctcctgtgtagcctccggattcacctttgaggattatcagatggggtgggtccgccaggctccagggaagggtctagagtgggtctcatcgatttcggctatgggtaatcggacatactacgcagactccgtgaagggccggttcaccatctcccgcgacgattccaagaacacgctgtatctgcaaatgaacagcctgcgtgccgaggacaccgcggtatattactgtgcgcaaaatctggttaggctggggaagtctaggtggatgtttgactactggggtcagggaaccctggtcacagtctcgagc

SEQ ID NO: 692 - DNA, 369 bp, Artificial Sequence
  Chemically synthesized ABT2-65-76
gaggtgcagctgttggagtctgggggaggcttggtacagcctggggggtccctgcgtctctcctgtgtagcctccggattcacctttgaggattatcagatggggtgggtccgccaggctccggggaagggtctagagtgggtcacatcgatttcggctatgggtaatcggacatactacgcagactccgtgaagggccggttcaccatctcccgcgacgattccaagaacacgctgtacctgcaaatgaacagcctgcgtgccgaggacaccgcggtatattactgtgcgcaaaatctggttaggctggggaggtctaggtggatgtttgactactggggtcagggaaccctggtcacagtctcgagc

SEQ ID NO: 693 - DNA, 369 bp, Artificial Sequence
  Chemically synthesized ABT2-65-77
gaggtgcagctgttggagtctgggggaggcttggtacagcatggggggtccctgcgtctctcctgtgtagcctccggattcacctttgaggattatcagatggggtgggtccgccaggctccagggaagggtctagagtgggtctcatcgatttcggctatgggtaatcggacatactacgcagactccgtgaagggccggttcaccatctcccgcgacgattccaagaacacgctgtatctgcaaatgaacagcctgcgtgccgaggacaccgcggtatattactgtgcgcaaaatctggttaggctggggaggtctaggtggatgtttgactactggggtcagggaaccttggtcactgtctcgagc

SEQ ID NO: 694 - DNA, 369 bp, Artificial Sequence
  Chemically synthesized ABT2-65-78
gaggtgcagctgttggagtctgggggaggcttggtacagcctggggggtccctgcgtctctcctgtgtagcctccggattcacctttgaggattatcagatggggtgggtccgccaggctccagggaagggtctagagtgggtctcatcgatttcggctatgggtaatcggacatactacgcagactccgtgaagggccggttcaccatctcccgcgacgattccaagaacacgctgtatctgcaaatgaacagcctgcgtgccgaggacaccgcggtatattactgtgcgcaaaatctggttaggctggggacgtctaggtggatgtttgactactggggtcagggagccctggtcacagtctcgagc

SEQ ID NO: 695 - DNA, 369 bp, Artificial Sequence
  Chemically synthesized ABT2-65-79
gaggtgcagctgttggagtctgggggaggcttggtacagcctggggggtccctgcgtctctcctgtgtagcctccggattcacctttgaggattatcagatggggtgggtccgccaggctccagggaagggtctagagtgggtctcatcgatttcggctatgggtaatcggacatactacgcagactccgtgaagggccggttcaccatctcccgcgacgattccaagaacacgctgtatctgcaaatgaacagcctgcgtgccggggacaccgcggtatattactgtgcgcaaaatctggttaggctggggaggtctaggtggatgtttgactactggggtcagggaaccatggtcacagtctcgagc

SEQ ID NO: 696 - DNA, 369 bp, Artificial Sequence
  Chemically synthesized ABT2-65-80
gaggtgcagctgttggagtctgggggaggcttggtacagcctggggggtccctgcgtctcgcctgtgtagcctccggattcacctttgaggattatcagatggggtgggtccgccaggctccagggaagggtctagagtgggtctcatcgatttcggctatgggtaatcggacatactacgcagactccgtgaagggtcggttcaccatctcccgcgacgattccaagaacacgctgtatctgcaaatgaacagcctgcgtgccgaggacaccgcggtatattactgtgcgcaaaatctggttaggctggggaggtctaggtggatgtttgactactggggtcagggaaccctggtcacagtctcgagc

SEQ ID NO: 697 - DNA, 369 bp, Artificial Sequence
  Chemically synthesized ABT2-65-81
gaggtgcagctgttggagtctgggggaggcttggtacagcctggggggtccctgcgtctctcctgtgtagcctccggattcacctttgaggaatatcagatggggtgggtccgccaggctccagggaagggtctagagtgggtctcatcgatttcggctatgggtaatcggacatactacgcagactccgtgaagggccggttcactatctcccgcgacgattccaagaacacgctgtatctgcaaatgaacagcctgcgtgccgaggacaccgcggtatattactgtgcgcaaaatctggttaggctggggaggtctaggtggatgtttgactactggggtcagggaaccctggtcacagtctcgagc

SEQ ID NO: 698 - DNA, 369 bp, Artificial Sequence
  Chemically synthesized ABT2-65-82
gaggtgcagctgttggagtctgggggaggcttggtacggcctggggggtccctgcgtctctcctgtgtagcctccggattcacctttgaggattatcagatggggtgggtccgccaggctccagggaagggtctagagtgggtctcatcgatttcggctatgggtaatcggacatactacgcagactccgtgaagggccggttcaccatctcccgcgacgatcccaagaacacgctgtatctgcaaatgaacagcctgcgtgccgaggacaccgcggtatattactgtgcgcaaaatctggttaggctggggaggtctaggtggatgtttgactactggggtcagggaaccctggtcacagtctcgagc

SEQ ID NO: 699 - DNA, 369 bp, Artificial Sequence
  Chemically synthesized ABT2-65-83
gaggtgcagctgttggagtctgggggaggcttggtacagcctggggggtccctgcgtctctcctgtgtagcctccggattcacctttgaggattatcagatggggtgggtccgccaggctccagggaagggtctagagtgggtctcatcgatttcggctatgggtaatcggacatactacgcagactccgtgaagggccggttcaccatctcccgcgacgattccaagaacacgctgtatctgcaaatgaacagccagcgtgccgaggacaccgcggtatattactgtgcgcaaaatctggttaggctggggaggtctaggtggatgtttgactactggggtcagggaaccctggtcacagtctcgagc

SEQ ID NO: 700 - DNA, 369 bp, Artificial Sequence
  Chemically synthesized ABT2-65-84
gaggtgcagctgttggagtctgggggaggcttggtacagcctggggggtccctgcgtctctcctgtgtagcctccggattctcctttgaggattatcagatggggtgggtccgccaggctccacggaagggtctagagtggatctcatcgatttcggctatgggtaatcggacatactacgcagactccgtgaagggccggttcaccatctcccgcgacgattccaagaacacgctgtatctgcaaatgaacagcctgcgtgccgaggacaccgcggtatattactgtgcgcaaaatctggttaggctggggaggtctaggtggatgtttgactactggggtcagggaaccctggtcacagtctcgagc

SEQ ID NO: 701 - DNA, 369 bp, Artificial Sequence
  Chemically synthesized ABT2-65-85
gaggtgcagctgatggagtctgggggaggcttggtacagcctggggggtccctgcgtctctcctgtgtagcctccggattcacctttgaggattatcagatggggtgggtccgccaggctccagggaagggtctagagtgggtctcatcgatttcggctatgggtaaccggacatactacgcagactccgtgaagggccggttcgccatctcccgcgacgattccaagaacacgctgtatctgcaaatgaacagcctgcgtgccaaggacaccgcggtatattactgtgcgcaaaatctggttaggctggggaggtctaggtggatgtttgactactggggtcagggaaccctggtcacagtctcgagc

SEQ ID NO: 702 - DNA, 369 bp, Artificial Sequence
  Chemically synthesized ABT2-65-86
gaggtgcagctgttggagtctgggggaggcttggtacggcctggggggtcccagcgtctctcctgtgtagcctccggattcacctctgaggattatcagatggggtgggtccgccaggctccagggaagggtctagagtgggtctcatcgatttcggctatgggtaatcggacatactacgcagactccgtgaagggccggttcaccatctcccgcgacgattccaagaacacgctgtatctgcaaatgaacagcctgcgtgccgaggacaccgcggtatattactgtgcgcaaaatctggttaggctggggaggtctaggtggatgtttgactactggggtcagggaaccctggtcacagtctcgagc

SEQ ID NO: 703 - DNA, 369 bp, Artificial Sequence
  Chemically synthesized ABT2-65-87
gaggtgcagctgttggagtctgggggaggcttggtacagcctggggggtccctgcgtctctcctgtgtagcctccggattcacctttgaggattatcagatggggtgggtccgccaggctccagggaaggatctagagtgggtctcatcgatttcggctatgggtaatcggacatactacgcagactccgtgaagggccggttcaccatctcccgcgacgattccaagaacacgctgtatctgcaaatgaacagcctgcgtgccgaggacaccgcggtatattactgtgcgcaaaatctggttaggctggggaggtctaggtggatgtttgactactggggtcagggaaccctggtcacagtctcgagc

SEQ ID NO: 704 - DNA, 369 bp, Artificial Sequence
  Chemically synthesized ABT2-65-88
gaggtgcagttgttggagtctgggggaggcttggtacagcctggggggtccctgcgtctctactgtgtagcctccggattcacctttgaggattatcagatggggtgggtccgccaggctccagggaagggtctagagtgggtctcatcgatttcggctatgggtaatcggacatactacgcagactccgtgaagggccggttcacaatctcccgcgacgattccaagaacacgctgtatctgcaaatgaacagcctgcgtgccgaggacaccgcggtatattactgtgcgcaaaatctggttaggctggggaggtctaggtggatgtttgactactggggtcagggaaccctggtcacagtctcgagc

SEQ ID NO: 705 - DNA, 369 bp, Artificial Sequence
  Chemically synthesized ABT2-65-89
gaggtgcagctgttggagtctgggggaggcttggtacagcctggggggtccctgcgtctctcctgtgtagcctccggattcacctttgaggattatcagatggggtgggtccgccaggctccagggaagggtctagagtgggtctcatcgatttcggctatgggtaatcggacatactacgcagactccgtgaagggccggttcaccatctcccgcgacgattccaagaacacgctgtatctgcaaatgaacagcctgcgagccgaggacaccgcggtatattactgtgcgcaaaatatggttaggctggggaggtctaggtggatgtttgactactggggtcagggaaccctggtcacagtctcgagc

SEQ ID NO: 706 - DNA, 369 bp, Artificial Sequence
  Chemically synthesized ABT2-65-90
gaggtgcagctgttggagtctgggggaggcttggtacagcctggggggtccctgcgtctctcctgtgtagcctccggattcacctttgaggattatcagatggggtgggtccgccaggctccagggaagggtcaagagtgggtctcatcgatttcggctatgggtaatcggacatactacgcagactccgtgaagggccggttcaccatctcccgcgacgattccaagaacacgctgtatctgcaaatgaacagcctgcgtgccgaggacaccgcggtatattactgtgcgcaaaatctggttaggctggggaggtctaggtggatgtttgactactggggtcacggaaccctggtcacagtctcgagc

SEQ ID NO: 707 - DNA, 369 bp, Artificial Sequence
  Chemically synthesized ABT2-65-113
gaggtgcagctgttggagtctgggggaggcttggtacagcctggggggtccctgcgtctctcctgtgcagcctccggattcacctttgtgcagtatcagatgggttgggtccgccaggctccagggaagggtctagagtgggtctcatcgatttcggctatgggtaatcggacatactacgcagactccgtgaagggccggttcaccatctcccgcgacgattccaagaacacgctgtatctgcaaatgaacagcctgcgtgccgaggacaccgcggtatattactgtgcgcaaaatctggttaggctggggaggtctaggtggatgtttgactactggggtcagggaaccctggtcacagtctcgagc

SEQ ID NO: 708 - DNA, 369 bp, Artificial Sequence
  Chemically synthesized ABT2-65-114
gaggtgcagctgttggagtctgggggaggcttggtacagcctggggggtccctgcgtctctcctgtgcagcctccggattcacctttagggagtatatgatgggttgggtccgccaggctccagggaagggtctagagtgggtctcatcgatttcggctatgggtaatcggacatactacgcagactccgtgaagggccggttcaccatctcccgcgacgattccaagaacacgctgtatctgcaaatgaacagcctgcgtgccgaggacaccgcggtatattactgtgcgcaaaatctggttaggctggggaggtctaggtggatgtttgactactggggtcagggaaccctggtcacagtctcgagc

SEQ ID NO: 709 - DNA, 369 bp, Artificial Sequence
  Chemically synthesized ABT2-65-115
gaggtgcagctgttggagtctgggggaggcttggtacagcctggggggtccctgcgtctctcctgtgcagcctccggattcacctttattgattatcagatggggtgggtccgccaggctccagggaagggtctagagtgggtctcatcgatttcggctatgggtaatcggacatactacgcagactccgtgaagggccggttcaccatctcccgcgacgattccaagaacacgctgtatctgcaaatgaacagcctgcgtgccgaggacaccgcggtatattactgtgcgcaaaatctggttaggctggggaggtctaggtggatgtttgactactggggtcagggaaccctggtcacagtctcgagc

SEQ ID NO: 710 - DNA, 369 bp, Artificial Sequence
  Chemically synthesized ABT2-65-116
gaggtgcagctgttggagtctgggggaggcttggtacagcctggggggtccctgcgtctctcctgtgcagcctccggattcacctttgcgggttattatatgggttgggtccgccaggctccagggaagggtctagagtgggtctcatcgatttcggctatgggtaatcggacatactacgcagactccgtgaagggccggttcaccatctcccgcgacgattccaagaacacgctgtatctgcaaatgaacagcctgcgtgccgaggacaccgcggtatattactgtgcgcaaaatctggttaggctggggaggtctaggtggatgtttgactactggggtcagggaaccctggtcacagtctcgagc

SEQ ID NO: 711 - DNA, 369 bp, Artificial Sequence
  Chemically synthesized ABT2-65-117
gaggtgcagctgttggagtctgggggaggcttggtacggcctggggggtccctgcgtctctcctgtgtagcctccggattcacctttgaggattatcagatggggtgggtccgccaggctccagggaagggtctagagtggatctcatcgatttcggctatgggtaatcggacatactacgcagactccgtgaagggccggttcaccatctcccgcgacgattccaagaacacgctgtatctgcaaatgaacagcctgcgtgccgaggacaccgcggtatattactgtgcgcaaaatctggttaggctggggaggtctaggtggatgtttgactactggggtcagggaaccctggtcacagtctcgagc

SEQ ID NO: 712 - DNA, 369 bp, Artificial Sequence
  Chemically synthesized ABT2-65-118
gaggtgcagctgttggagtctgggggaggcttggtacagcctggggggtccctgcgtctctcctgtgcagcctccggattcacctttgcgacttatacgatgggttgggtccgccaggctccagggaagggtctagagtgggtctcatcgatttcggctatgggtaatcggacatactacgcagactccgtgaagggccggttcaccatctcccgcgacgattccaagaacacgctgtatctgcaaatgaacagcctgcgtgccgaggacaccgcggtatattactgtgcgcaaaatctggttaggctggggaggtctaggtggatgtttgactactggggtcagggaaccctggtcacagtctcgagc

SEQ ID NO: 713 - DNA, 369 bp, Artificial Sequence
  Chemically synthesized ABT2-65-119
gaggtgcagctgttggagtctgggggaggcttggtacagcctggggggtccctgcgtctctcctgtgcagcctccggattcacctttattgcgtatccgatgggttgggtccgccaggctccagggaagggtctagagtgggtctcatcgatttcggctatgggtaatcggacatactacgcagactccgtgaagggccggttcaccatctcccgcgacgattccaagaacacgctgtatctgcaaatgaacagcctgcgtgccgaggacaccgcggtatattactgtgcgcaaaatctggttaggctggggaggtctaggtggatgtttgactactggggtcagggaaccctggtcacagtctcgagc

SEQ ID NO: 714 - DNA, 369 bp, Artificial Sequence
  Chemically synthesized ABT2-65-120
gaggtgcagctgttggagtctgggggaggcctggtacagcctggggggtccctgcgtctctcctgtgtagcctccggattcacctttgaggattatcagatggggtgggtccgccaggctccagggaagggtctagagtgggtctcatcgatttctgctatgggtatgcggacatactacgcagactccgtgaagggccggttcaccatctcccgcgacgattccaagaacacgctgtatctgcaaatgaacagcctgcgtgccgaggacaccgcggtatattactgtgcgcaaaatctggttaggctggggaggtctaggtggatgtttgactactggggtcagggaaccctggtcacagtctcgagc

SEQ ID NO: 715 - DNA, 369 bp, Artificial Sequence
  Chemically synthesized ABT2-65-121
gaggtgcagctgttggagtctgggggaggcttggtacagcctggggggtccctgcgtctctcctgtgtagcctccggattcacctttgaggattatcagatggggtgggtccgccaggctccagggaagggtctagagtgggtctcatctattgcggctcatggtaataggacatactacgcagactccgtgaagggccggttcaccatctcccgcgacgattccaagaacacgctgtatctgcaaatgaacagcctgcgtgccgaggacaccgcggtatattactgtgcgcaaaatctggttaggctggggaggtctaggtggatgtttgactactggggtcagggaaccctggtcacagtctcgagc

SEQ ID NO: 716 - DNA, 369 bp, Artificial Sequence
  Chemically synthesized ABT2-65-122
gaggtgcagctgttggagtctgggggaggcttggtacggcctggggggtccctgcgtctctcctgtgtagcctccggattcacctttgaggattatcagatggggtgggtccgccaggctccagggaagggtctagagtgggtctcatcgatttcggctatgggtaatcggacatactacgcagactccgtgaagggccggttcaccatctcccgcgacgattccaagaacacgctgtatctgcaaatgaacagcctgcgtgccgaggacaccgcggtatattactgtgcgcaaaatctggttaggctggggaggtctaggtggatgtttgactactggggtcagggaaccctggtcacagtctcgagc

SEQ ID NO: 717 - DNA, 369 bp, Artificial Sequence
  Chemically synthesized ABT2-65-123
gaggtgcagctgttggagtctgggggaggcttggtacagcctggggggtccctgcgtctctcctgtgtagcctccggattcacctttgaggattatcagatggggtgggtccgccaggctccagggaagggtctagagtgggtctcatcgatttcggctatgggtaatcggagatactacgcagactccgtgaagggccggttcaccatctcccgcgacaattccaagaacacgctgtatctgcaaatgaacatcctgcgtgccgaggacaccgcggtatattactgtgcgcaaaatctggttaggctggggaggtctaggtgggtgtttgactactggggtcagggaaccctggtcacagtctcgagc

SEQ ID NO: 718 - DNA, 369 bp, Artificial Sequence
  Chemically synthesized ABT2-65-124
gaggtgcagctgttggagtctgggggaggcttggtacagcctggggggtccctgcgtctctcctgtgtagcctccggattcacctttgaggattatcagatggggtgggtccgccaggctccagggaagggtctagagtgggtctcatcgatttcggctgtgggtaatcggacatactacgcagactccgtgaagggccggttcaccatctcccgcgacgattccaagaacacgctgtatctgcaaatgaacagcctgcgtgccgaggacatcgcggtatattactgtgcgcaaaatctggttaggctggggaggtctaggtggatgtttgactactggggtcagggaaccctggtcacagtctcgagc

SEQ ID NO: 719 - DNA, 369 bp, Artificial Sequence
  Chemically synthesized ABT2-65-125
gaggtgcagctgttggagtctgggggaggcttggtacagcctggggggtccctgcgtctctcctgtgtagcctccggattcacctttgaggattatcagatggggtgggtccgccaggctccagggaagggtctagagtggatctcatcgatttcggctatgggtaatcggacatactacgcagactccgtgaagggccggttcaccatctcccgcgacgattccaagaacacgctgtatctgcaaatgaacagcctgcgtgccgaggacaccgcggtatattactgtgcgcaaaatctggttaggctggggaggtctaggtggatgtttgactactggggtcagggaaccctggtcacagtctcgagc

SEQ ID NO: 720 - DNA, 369 bp, Artificial Sequence
  Chemically synthesized ABT2-65-126
gaggtgcagctgttggagtctgggggaggcttggtacagcctggggggtccctgcgtatctcctgtgtaacctccgggttcacctttgaggattatcagatggggtgggtccgccaggctccagggaagggtctagagtgggtctcatcgatttcggctatgggtaatcggacatactacgcagactccgtgaagggccggttcaccatctcccgcgacgattccaagaacacgctgaatctgcaaatgaacagcctgcgtgccgaggacaccgcggtatattactgtgcgcaaaatctggttaggctggggaggtctaggtgggtgtttgactactggggtcagggaaccctggtcacagtctcgagc

SEQ ID NO: 721 - DNA, 369 bp, Artificial Sequence
  Chemically synthesized ABT2-65-127
gaggtgcagctgttggagtctgggggaggcttggtacagcctggggggtccctgcgtctctcctgtgtagcctccggattcacctttgaggattatcagatggggtgggtccgccaggctccagggaagggtctagagtgggtcacatcgatttcggctatgggtaatcggacatactacgcagactccgtgaagggccggttcaccatctcccgcgacgattccaagaacacgctgtatctgcaaatgaacagcctgcgtgccgaggacaccgcggtatattactgtgcgcaaaatctggttaggctggggaggtctaggtggatgtttgactactggggtcagggaaccctggtcacagtctcgagc

SEQ ID NO: 722 - DNA, 369 bp, Artificial Sequence
  Chemically synthesized ABT2-65-128
gaggtgcagctgttggagtctgggagaggcttggtacagcctggggggtccctgcgtctctcctgtgtagcctccggattcacctttgaggattatcagatggggtgggtccgccaggctccagggaagggtctagagtgggtctcatcgatttcggatatgggtaatcggacatactacgcagactccgtgaagggccggttcaccatctcccgcgacgattccaagaacacgctgtatctgcaaatgaacagcctgcgtgccgaggacaccgcggtatattactgtgcgcaaaatctggttaggctggggaggtctaggtggatgtttgactactggggtcagggaaccctggtcacagtctcgagc

SEQ ID NO: 723 - DNA, 369 bp, Artificial Sequence
  Chemically synthesized ABT2-65-129
gaggtgcagctgttggagtctgggggaggcttggtacagcctggggggtccctgcgtctctcctgtgtagcctccggtttcacctttgaggattatcagatggggtgggtccgccaggctccagggaagggtctagagtgggtctcaacggtttcggctatgggtaatcggacatactacgcagactccatgaagggccggttcaccatctctcgcgacgattccaagaacacgctgtatctgcaaatgaacagcctgcgtgcagaggacaccgcggtatattactgtgcgcaaaatctggttaggctggggaggtctaggtggatgtttgactactggggtcagggaaccctggtcacagtctcgagc

SEQ ID NO: 724 - DNA, 369 bp, Artificial Sequence
  Chemically synthesized ABT2-65-130
gaggtgcagctgttggagtctgggggaggcttggtacagcctggggggtccctgcgtctctcctgtgtagcctccggattcacctttgaggattatcagatggggtgggtccgccaggctccagggaagggtctagagtgggtctcatcgatttcggctatggttaatcggacatactacgcagactccgtgaagggcaggttcaccatctcccgcgacgattccaagaacacgctgtatctgcaaatgaacagcctgcgtgccgaggacaccgcggtatattactgtgcgcaaaatctggttaggctggggaggtctaggtggatgtttgactactggggtcagggaaccctggtcacagtctcgagc

SEQ ID NO: 725 - DNA, 369 bp, Artificial Sequence
  Chemically synthesized ABT2-65-131
gaggtgcagctgttggagtctgggggaggcttggtacagcctcgggggtccctgcgtctctcctgtgtagcctccggattcacctttgaggattatcagatggggtgggtccgccaggctccaggcaagggtctagagtgggtctcatcgatttcgactatgggtaatcggacatactacgcagactccgtgaagggccggttcaccatctcccgcgacgattccaagaacacgctgtatctgcaaatgaacagcctgcgtgcagaggacaccgcggtatatcactgtgcgcaaaatctggttaggttggggaggtctaggtggatgtttgactactggggtcagggaaccctggtcacagtctcgagc

SEQ ID NO: 726 - DNA, 369 bp, Artificial Sequence
  Chemically synthesized ABT2-65-132
gaggtgcagctgttggagtctgggggaggcttggtacagcctggggggtccctgcgtctctcctgtgcagcctccggattcacctttgaggattatcagatggggtgggtccgccaggctccagggaagggtctagagtgggtctcatcgatttcggctatgggtaatcggacatactacgcagactccgtgaagggccggttcaccatctcccgcgacgattccaagaacacgctgtatctgcaaatgaacagcctgcgtgccgaggacaccgcggtatattactgtgcggaaaatctggttcgtcttgcttcgaggaggtggatgtttgactactggggtcagggaaccctggtcaccgtctcgagc

SEQ ID NO: 727 - DNA, 369 bp, Artificial Sequence
  Chemically synthesized ABT2-65-133
gaggtgcagctgttggagtctgggggaggcttggtacagcctggggggtccctgcgtctctcctgtgcagcctccggattcacctttgaggattatcagatggggtgggtccgccaggctccagggaagggtctagagtgggtctcatcgatttcggctatgggtaatcggacatactacgcagactccgtgaagggccggttcaccatctcccgcgacgattccaagaacacgctgtatctgcaaatgaacagcctgcgtgccgaggacaccgcggtatattactgtgcggaaaatctggttcattggaagagggggggttggatgtttgactactggggtcagggaaccctggtcaccgtctcgagc

SEQ ID NO: 728 - DNA, 369 bp, Artificial Sequence
  Chemically synthesized ABT2-65-134
gaggtgcagctgttggagtctgggggaggcttggtacagcctggggggtccctgcgtctctcctgtgcagcctccggattcacctttgaggattatcagatggggtgggtccgccaggctccagggaagggtctagagtgggtctcatcgatttcggctatgggtaatcggacatactacgcagactccgtgaagggccggttcaccatctcccgcgacgattccaagaacacgctgtatctgcaaatgaacagcctgcgtgccgaggacaccgcggtatattactgtgcggaaaatctggttaagttgtctaagagtcgttggatgtttgactactggggtcagggaaccctggtcaccgtctcgagc

SEQ ID NO: 729 - DNA, 369 bp, Artificial Sequence
  Chemically synthesized ABT2-65-135
gaggtgcagctgttggagtctgggggaggcttggtacagcctggggggtccctgcgtctctcctgtgcagcctccggattcacctttgaggattatcagatggggtgggtccgccaggctccagggaagggtctagagtgggtctcatcgatttcggctatgggtaatcggacatactacgcagactccgtgaagggccggttcaccatctcccgcgacgattccaagaacacgctgtatctgcaaatgaacagcctgcgtgccgaggacaccgcggtatattactgtgcggaaaatctggttaggattaagaagatgaagtggatgtttgactactggggtcagggaaccctggtcaccgtctcgagc

SEQ ID NO: 730 - DNA, 369 bp, Artificial Sequence
  Chemically synthesized ABT2-65-136
gaggtgcagctgttggagtctgggggaggcttggtacagcctggggggtccctgcgtctctcctgtgcagcctccggattcacctttgaggattatcagatggggtgggtccgccaggctccagggaagggtctagagtgggtctcatcgatttcggctatgggtaatcggacatactacgcagactccgtgaagggccggttcaccatctcccgcgacgattccaagaacacgctgtatctgcaaatgaacagcctgcgtgccgaggacaccgcggtatattactgtgcggaaaatctggttaagctgtcgcgtactgagtggatgtttgactactggggtcagggaaccctggtcaccgtctcgagc

SEQ ID NO: 731 - DNA, 369 bp, Artificial Sequence
  Chemically synthesized ABT2-65-137
gaggtgcagctgttggagtctgggggaggcttggtacagcctggggggtccctgcgtctctcctgtgcagcctccggattcacctttgaggattatcagatggggtgggtccgccaggctccagggaagggtctagagtgggtctcatcgatttcggctatgggtaatcggacatactacgcagactccgtgaagggccggtttaccatctcccgcgacgattccaagaacacgctgtatctgcaaatgaacagcctgcgtgccgaggacaccgcggtatattactgtgcggaaaatctggttcggacggctaagcgtaggtggatgtttgactactggggtcagggaaccctggtcaccgtctcgagc

SEQ ID NO: 732 - DNA, 369 bp, Artificial Sequence
  Chemically synthesized ABT2-65-138
gaggtgcagctgttggagtctgggggaggcttggtacagcctggggggtccctgcgtctctcctgtgcagcctccggattcacctttgaggattatcagatggggtgggtccgccaggctccagggaagggtctagagtgggtctcatcgatttcggctatgggtaatcggacatactacgcagactccgtgaagggccggttcaccatctcccgcgacgattccaagaacacgctgtatctgcaaatgaacagcctgcgtgccgaggacaccgcggtatattactgtgcggaaaatctggttcgggttacggcgcggaagtggatgtttgactactggggtcagggaaccctggtcaccgtctcgagc

SEQ ID NO: 733 - DNA, 369 bp, Artificial Sequence
  Chemically synthesized ABT2-65-139
gaggtgcagctgttggagtctgggggaggcttggtacagcctggggggtccctgcgtctctcctgtgcagcctccggattcacctttgaggattatcagatggggtgggtccgccaggctccagggaagggtctagagtgggtctcatcgatttcggctatgggtaatcggacatactacgcagactccgtgaagggccggttcaccatctcccgcgacgattccaagaacacgctgtatctgcaaatgaacagcctgcgtgccgaggacaccgcggtatattactgtgcgcaaaatctggttagggtgcgtgtgcgtcggtggatgtttgactactggggtcagggaaccctggtcaccgtctcgagc

SEQ ID NO: 734 - DNA, 369 bp, Artificial Sequence
  Chemically synthesized ABT2-65-140
gaggtgcagctgttggagtctgggggaggcttggtacagcctggggggtccctgcgtctctcctgtgcagcctccggattcacctttgaggattatcagatggggtgggtccgccaggctccagggaagggtctagagtgggtctcatcgatttcggctatgggtaatcggacatactacgcagactccgtgaagggccggttcaccatctcccgcgacgattccaagaacacgctgtatctgcaaatgaacagcctgcgtgccgaggacaccgcggtatattactgtgcggaaaatctggttaagatttcgaggcgtcattggatgtttgactactggggtcagggaaccctggtcaccgtctcgagc

SEQ ID NO: 735 - DNA, 369 bp, Artificial Sequence
  Chemically synthesized ABT2-65-141
gaggtgcagctgttggagtctgggggaggcttggtacagcctggggggtccctgcgtctctcctgtgcagcctccggattcacctttgaggattatcagatggggtgggtccgccaggctccagggaagggtctagagtgggtctcatcgatttcggctatgggtaatcggacatactacgcagactccgtgaagggccggttcaccatctcccgcgacgattccaagaacacgctgtatctgcaaatgaacagcctgcgtgccgaggacaccgcggtatattactgtgcggaaaatctggttaggattaagcagacgaagtggatgtttgactactggggtcagggaaccctggtcaccgtctcgagc

SEQ ID NO: 736 - DNA, 369 bp, Artificial Sequence
  Chemically synthesized ABT2-65-142
gaggtgcagctgttggagtctgggggaggcttggtacagcctggggggtccctgcgtctctcctgtgcagcctccggattcacctttgaggattatcagatggggtgggtccgccaggctccagggaagggtctagagtgggtctcatcgatttcggctatgggtaatcggacatactacgcagactccgtgaagggccggttcaccatctcccgcgacgattccaagaacacgctgtatctgcaaatgaacagcctgcgtgccgaggacaccgcggtatattactgtgcggaaaatctggttaagatttctgcgagggagtggatgtttgactactggggtcagggaaccctggtcaccgtctcgagc

SEQ ID NO: 737 - DNA, 369 bp, Artificial Sequence
  Chemically synthesized ABT2-65-143
gaggtgcagctgttggagtctgggggaggcttggtacagcctggggggtccctgcgtctctcctgtgcagcctccggattcacctttgaggattatcagatggggtgggtccgccaggctccagggaagggtctagagtgggtctcatcgatttcggctatgggtaatcggacatactacgcagactccgtgaagggccggttcaccatctcccgcgacgattccaagaacacgctgtatctgcaaatgaacagcctgcgtgccgaggacaccgcggtatattactgtgcggaaaatctggttcgtctgcagagggataggtggatgtttgactactggggtcagggaaccctggtcaccgtctcgagc

SEQ ID NO: 738 - DNA, 369 bp, Artificial Sequence
  Chemically synthesized ABT2-65-144
gaggtgcagctgttggagtctgggggaggcttggtacagcctggggggtccctgcgtctctcctgtgcagcctccggattcacctttgaggattatcagatggggtgggtgcgccaggctccagggaagggtctagagtgggtctcatcgatttcggctatgggtaatcggacatactacgcagactccgtgaagggccggttcaccatctcccgcgacgattccaagaacacgctgtatctgcaaatgaacagcctgcgtgccgaggacaccgcggtatattactgtgcggaaaatctggttcgtatttcgaagaagcagtggatgtttgactactggggtcagggaaccctggtcaccgtctcgagc

SEQ ID NO: 739 - DNA, 369 bp, Artificial Sequence
  Chemically synthesized ABT2-65-145
gaggtgcagctgttggagtctgggggaggcttggtacagcctggggggtccctgcgtctctcctgtgcagcctccggattcacctttgaggattatcagatggggtgggtccgccaggctccagggaagggtctagagtgggtctcatcgatttcggctatgggtaatcggacatactacgcagactccgtgaagggccggttcaccatctcccgcgacgattccaagaacacgctgtatctgcaaatgaacagcctgcgtgccgaggacaccgcggtatattactgtgcggaaaatctggttaggattcagaaggttaagtggatgtttgactactggggtcagggaaccctggtcaccgtctcgagc

SEQ ID NO: 740 - DNA, 369 bp, Artificial Sequence
  Chemically synthesized ABT2-65-146
gaggtgcagctgttggagtctgggggaggcttggtacagcctggggggtccctgcgtctctcctgtgcagcctccggattcacctttgaggattatcagatggggtgggtccgccaggctccagggaagggtctagagtgggtctcatcgatttcggctatgggtaatcggacatactacgcagactccgtgaagggccggttcaccatctcccgcgacgattccaagaacacgctgtatctgcaaatgaacagcctgcgtgccgaggacaccgcggtatattactgtgcggaaaatctggttaggactatgaagcggaagtggatgtttgactactggggtcagggaaccctggtcaccgtctcgagc

SEQ ID NO: 741 - DNA, 369 bp, Artificial Sequence
  Chemically synthesized ABT2-65-147
gaggtgcagctgttggagtctgggggtggcttggtgcagcctggggggtccctgcgtctctcctgtgcagcctccggattcacctttgaggattatcagatggggtgggtccgccaggctccagggaagggtctagagtgggtctcatcgatttcggctatgggtaatcggacatactacgcagactccgtgaagggccggttcaccatctcccgcgacgattccaagaacacgctgtatctgcaaatgaacagcctgcgtgccgaggacaccgcggtatattactgtgcggaaaatctggttcggcttgggcggattcgttggatgtttgactactggggtcagggaaccctggtcaccgtctcgagc

SEQ ID NO: 742 - DNA, 369 bp, Artificial Sequence
  Chemically synthesized ABT2-65-148
gaggtgcagctgttggagtctgggggaggcttggtacagcctggggggtccctgcgtctctcctgtgcagcctccggattcacctttgaggattatcagatggggtgggtccgccaggctccagggaagggtctagagtgggtctcatcgatttcggctatgggtaatcggacatactacgcagactccgtgaagggccggttcaccatctcccgcgacgattccaagaacacgctgtatctgcaaatgaacagcctgcgtgccgaggacaccgcggtatattactgtgcgcaaaatctggttcggcttgggtcgaagaggtggatgtttgactactggggtcagggaaccctggtcaccgtctcgagc

SEQ ID NO: 743 - DNA, 369 bp, Artificial Sequence
  Chemically synthesized ABT2-65-149
gaggtgcagctgttggagtctgggggaggcttggtacagcctggggggtccctgcgtctctcctgtgcagcctccggattcacctttgaggattatcagatggggtgggtccgccaggctccaggaaagggtctagagtgggtctcgtcgatttcggctatgggtaatcggacatactacgcagactccgtgaagggccggttcaccatctcccgcgacgattccaagaacacgctgtatctgcaaatgaacagcctgcgtgccgaggacaccgcggtatattactgtgcggaaaatctggttcgtgttgataggaggcggtggatgtttgactactggggtcagggaaccctggtcaccgtctcgagc

SEQ ID NO: 744 - DNA, 369 bp, Artificial Sequence
  Chemically synthesized ABT2-65-150
gaggtgcagctgttggagtctgggggaggcttggtacagcctggggggtccctgcgtctctcctgtgcagcctccggattcacctttgaggattatcagatggggtgggtccgccaggctccagggaagggtctagagtgggtctcatcgatttcggctatgggtaatcggacatactacgcagactccgtgaagggccggttcaccatctcccgcgacgattccaagaacacgctgtatctgcaaatgaacagcctgcgtgccgaggacaccgcggtatattactgtgcggaaaatctggttctgattgcgcgtggtaagtggatgtttgactactggggtcagggaaccctggtcaccgtctcgagc

SEQ ID NO: 745 - DNA, 369 bp, Artificial Sequence
  Chemically synthesized ABT2-65-151
gaggtgcagctgttggagtctgggggaggcttggtacagcctggggggtccctgcgtctctcctgtgcagcctccggattcacctttgaggattatcagatggggtgggtccgccaggctccagggaagggtctagagtgggtctcatcgatttcggctatgggtaatcggacatactacgcagactccgtgaagggccggttcaccatctcccgcgacgattccaagaacacgctgtatctgcaaatgaacagcctgcgtgccgaggacaccgcggtatattactgtgcggaaaatctggttcgttggaggaagcatgcgtggatgtttgactactggggtcagggaaccctggtcaccgtctcgagc

SEQ ID NO: 746 - DNA, 369 bp, Artificial Sequence
  Chemically synthesized ABT2-65-152
gaggtgcagctgttggagtctgggggaggcttggtacagcctggggggtccctgcgtctctcctgtgcagcctccggattcacctttgaggattatcagatggggtgggtccgccaggctccagggaagggtctagagtgggtctcatcgatttcggctatgggtaatcggacatactacgcagactccgtgaagggccggttcaccatctcccgcgacgattccaagaacacgctgtatctgcaaatgaacagcctgcgtgccgaggacaccgcggtatattactgtgcggaaaatctggttcgttggaagagttcggcgtggatgtttgactactggggtcagggaaccctggtcaccgtctcgagc

SEQ ID NO: 747 - DNA, 369 bp, Artificial Sequence
  Chemically synthesized ABT2-65-154
gaggtgcagctgttggagtctgggggaggcttggtacagcctggggggtccctgcgtctctcctgtgcagcctccggattcacctttgaggattatcagatggggtgggtccgccaggctccagggaagggtctagagtgggtctcatcgatttcggctatgggtaatcggacacactacgcagactccgtgaagggccggttcaccatctcccgcgacgattccaagaacacgctgtatctgcaaatgaacagcctgcgtgccgaggacaccgcggtatattactgtgcgcaaaatctggttaggattcgtaggacgaagtggatgtttgactactggggtcagggaaccctggtcaccgtctcgagc

SEQ ID NO: 748 - DNA, 369 bp, Artificial Sequence
  Chemically synthesized ABT2-65-155
gaggtgcagctgttggagtctgggggaggcttggtacagcctggggggtccctgcgtctctcctgtgcagcctccggattcacctttgaggattatcagatggggtgggtccgccaggctccagggaagggtctagagtgggtctcatcgatttcggctatgggtaatcggacatactacgcagactccgtgaagggccggttcaccatctcccgcgacgattccaagaacacgctgtatctgcaaatgaacagcctgcgtgccgaggacaccgcggtatattactgtgcgcaaaatctggttttggttcagaggaggaagtggatgtttgactactggggtcagggaaccctggtcaccgtctcgagc

SEQ ID NO: 749 - DNA, 369 bp, Artificial Sequence
  Chemically synthesized ABT2-65-156
gaggtgcagctgttggagtctgggggaggcttggtacagcctggggggtccctgcgtctctcctgtgcagcctccggattcacctttgaggattatcagatggggtgggtccgccaggctccagggaagggtctagagtgggtctcatcgatttcggctatgggtaatcggacatactacgcagactccgtgaagggccggttcaccatctcccgcgacgattccaagaacacgctgtatctgcaaatgaacagcctgcgtgccgaggacaccgcggtatattactgtgcgcaaaatctggttcggattgggcggaataagtggatgtttgactactggggtcagggaaccctggtcaccgtctcgagc

SEQ ID NO: 750 - DNA, 369 bp, Artificial Sequence
  Chemically synthesized ABT2-65-157
gaggtgcagctgttggagtctgggggaggcttggtacagcctggggggtccctgcgtctctcctgtgcagcctccggattcacctttgaggattatcagatggggtgggtccgccaggctccagggaagggtctagagtgggtctcatcgatttcggctatgggtaatcggacatactacgcagactccgtgaagggccggttcaccatctcccgcgacgattccaagaacatgctgtatctgcaaatgaacagcctgcgtgccgaggacaccgcggtatattactgtgcggaaaatctggttcggcttagtctgcatcggtggatgtttgactactggggtcagggaaccctggtcaccgtctcgagc

SEQ ID NO: 751 - DNA, 369 bp, Artificial Sequence
  Chemically synthesized ABT2-65-158
gaggtgcagctgttggagtctgggggaggcttggtacagcctggggggtccctgcgtctctcctgtgcagcctccggattcacctttgaggattatcagatggggtgggtccgccaggctccagggaagggtctagagtgggtctcatcgatttcggctatgggtaatcggacatactacgcagactccgtgaagggccggttcaccatctcccgcgacgattccaagaacacgctgtatctgcaaatgaacagcctgcgtgccgaggacaccgcggtatattactgtgcgcaaaatctggttaagtggaagagggatttttggatgtttgactactggggtcagggaaccctggtcaccgtctcgagc

SEQ ID NO: 752 - DNA, 369 bp, Artificial Sequence
  Chemically synthesized ABT2-65-159
gaggtgcagctgttggagtctgggggaggcttggtacagcctggggggtccctgcgtctctcctgtgcagcctccggattcacctttgaggattatcagatggggtgggtccgccaggctccagggaagggtctagagtgggtctcatcgatttcggctatgggtaatcggacatactacgcagactccgtgaagggccggttcaccatctcccgcgacgattccaagaacacgctgtatctgcaaatgaacagcctgcgtgccgaggacaccgcggtatattactgtgcggaaaatctggttagggtgagtaaggcgaggtggatgtttgactactggggtcagggaaccctggtcaccgtctcgagc

SEQ ID NO: 753 - DNA, 369 bp, Artificial Sequence
  Chemically synthesized ABT2-65-160
gaggtgcagctgttggagtctgggggaggcttggtacagcctggggggtccctgcgtctctcctgtgtagcctccggattcacctttgaggattatcagatggggtgggtccgccaggctccagggaagggtctagagtgggtctcatcgatttcggctatgggtccccggacatactacgcagactccgtgaagggccggttcaccatctcccgcgacgattccaagaacacgctgtatctgcaaatgaacagcctgcgtgccgaggacaccgcggtatattactgtgcgcaaaatctggttaggctggggaggtctaggtggatgtttgactactggggtcagggaaccctggtcacagtctcgagc

SEQ ID NO: 754 - DNA, 369 bp, Artificial Sequence
  Chemically synthesized ABT2-65-163
gaggtgcagctgttggagtctgggggaggcttggtacagcctggggggtccctgcgtctctcctgtgtagcctccggattcacctttgaggattatcagatggggtgggtccgccaggctccagggaagggtctagagtgggtctcatcgatttcggctatgggtgggcggacatactacgcagactccgtgaagggccggttcaccatctcccgcgacgattccaagaacacgctgtatctgcaaatgaacagcctgcgtgccgaggacaccgcggtatattactgtgcgcaaaatctggttaggctggggaggtctaggtggatgtttgactactggggtcagggaaccctggtcacagtctcgagc

SEQ ID NO: 755 - DNA, 369 bp, Artificial Sequence
  Chemically synthesized ABT2-65-166
gaggtgcagctgttggagtctgggggaggcttggtacagcctggggggtccctgcgtctctcctgtgcagcctccggattcacctttgaggattatcagatggggtgggtccgccaggctccagggaagggtctagagtgggtctcatcgatttcggctatgggtggacggacatactacgcagactccgtgaagggccggttcaccatctcccgcgacaattccaagaacacgctgtatctgcaaatgaacagcctgcgtgccgaggacaccgcggtatattactgtgcgcaaaatctggttaggctggggaggtctaggtggatgtttgactactggggtcagggaaccctggtcacagtctcgagc

SEQ ID NO: 756 - DNA, 369 bp, Artificial Sequence
  Chemically synthesized ABT2-65-167
gaggtgcagctgttggagtctgggggaggcttggtacagcctggggggtccctgcgtctctcctgtgcagcctccggattcacctttgaggattatcagatggggtgggtccgccaggctccagggaagggtctagagtgggtctcatcgatttcggctatgggtaatcggacatactacgcagactccgtgaagggccggttcaccatctcccgcgacgattccaagaacacgctgtatctgcaaatgaacagcctgcgtgccgaggacaccgcggtatattactgtgcgcaaaatctggttcggtggaagaagaatgagtggatgtttgactactggggtcagggaaccctggtcaccgtctcgagc

SEQ ID NO: 757 - DNA, 369 bp, Artificial Sequence
  Chemically synthesized ABT2-65-168
gaggtgcagctgttggagtctgggggaggcttggtacagcctggggggtccctgcgtctctcctgtgcagcctccggattcacctttgaggattatcagatggggtgggtccgccaggctccagggaagggtctagagtgggtctcatcgatttcggctatgggtaatcggacatactacgcagactccgtgaagggccggttcaccatctcccgcgacgattccaagaacacgctgtatctgcaaatgaacagcctgcgtgccgaggacaccgcggtatattactgtgcgcaaaatctggttaggtggaagttggagtcttggatgtttgactactggggtcagggaaccctggtcaccgtctcgagc

SEQ ID NO: 758 - DNA, 369 bp, Artificial Sequence
  Chemically synthesized ABT2-65-169
gaggtgcagctgttggagtctgggggaggcttggtacagcctggggggtccctgcgtctctcctgtgcagcctccggattcacctttgaggattatcagatggggtgggtccgccaggctccagggaagggtctagagtgggtctcatcgatttcggctatgggtaatcggacatactacgcagactccgtgaagggccggttcaccatctcccgcgacgattccaagaacacgctgtatctgcaaatgaacagcctgcgtgccgaggacaccgcggtatattactgtgcggaaaatctggttaattggcggcgtgggtcttggatgtttgactactggggtcagggaaccctggtcaccgtctcgagc

SEQ ID NO: 759 - DNA, 369 bp, Artificial Sequence
  Chemically synthesized ABT2-65-170
gaggtgcagctgttggagtctgggggaggcttggtacagcctggggggtccctgcgtctctcctgtgcagcctccggattcacctttgaggattatcagatggggtgggtccgccaggctccagggaagggtctagagtgggtctcatcgatttcggctatgggtaatcggacatactacgcagactccgtgaagggccggttcaccatctcccgcgacgattccaagaacacgctgtatctgcaaatgaacagcctgcgtgccgaggacaccgcggtatattactgtgcggaaaatctggttcgggttcttcttaataagtggatgtttgactactggggtcagggaaccctggtcaccgtctcgagc

SEQ ID NO: 760 - DNA, 369 bp, Artificial Sequence
  Chemically synthesized ABT2-65-171
gaggtgcagctgttggagtctgggggaggcttggtacagcctggggggtccctgcgtctctcctgtgcagcctccggattcacctttgaggattatcagatggggtgggtccgccaggctccagggaagggtctagagtgggtctcatcgatttcggctatgggtaatcggacatactacgcagactccgtgaagggccggttcaccatctcccgcgacgattccaagaacacgctgtatctgcaaatgaacagcctgcgtgccgaggacaccgcggtatattactgtgcgcaaaatctggttcggttgaataggtcgcagtggatgtttgactactggggtcagggaaccctggtcaccgtctcgagc

SEQ ID NO: 761 - DNA, 369 bp, Artificial Sequence
  Chemically synthesized ABT2-65-172
gaggtgcagctgttggagtctgggggaggcttggtacagcctggggggtccctgcgtctctcctgtgcagcctccggattcacctttgaggattatcagatggggtgggtccgccaggctccagggaagggtctagagtgggtctcatcgatttcggctatgggtaatcggacatactacgcagactccgtgaagggccggttcaccatctcccgcgacgattccaagaacacgctgtatctgcaaatgaacagcctgcgtgccgaggacaccgcggtatattactgtgcggaaaatctggttcggtggaagaagggttcttggatgtttgactactggggtcagggaaccctggtcaccgtctcgagc

SEQ ID NO: 762 - DNA, 369 bp, Artificial Sequence
  Chemically synthesized ABT2-65-173
gaggtgcagctgttggagtctgggggaggcttggtacagcctggggggtccctgcgtctctcctgtgcagcctccggattcacctttgaggattatcagatggggtgggtccgccaggctccagggaagggtctagagtgggtctcatcgatttcggctatgggtaatcggacatactacgcagactccgtgaagggccggttcaccatctcccgcgacgattccaagaacacgctgtatctgcaaatgaacagcctgcgtgccgaggacaccgcggtatattactgtgcgcaaaatctggttaggtttcgggcgaaggagtggatgtttgactactggggtcagggaaccctggtcaccgtctcgagc

SEQ ID NO: 763 - DNA, 369 bp, Artificial Sequence
  Chemically synthesized ABT2-65-174
gaggtgcagctgttggagtctgggggaggcttggtacagcctggggggtccctgcgtctctcctgtgcagcctccggattcacctttgaggattatcagatggggtgggtccgccaggctccagggaagggtctagagtgggtctcatcgatttcggctatgggtaatcggacatactacgcagactccgtgaagggccggttcaccatctcccgcgacgattccaagaacacgctgtatctgcaaatgaacagcctgcgtgccgaggacaccgcggtatattactgtgcgcaaaatctggttaggtttaagaagacgcagtggatgtttgactactggggtcagggaaccctggtcaccgtctcgagc

SEQ ID NO: 764 - DNA, 369 bp, Artificial Sequence
  Chemically synthesized ABT2-65-175
gaggtgcagctgttggagtctgggggaggcttggtacagcctggggggtccctgcgtctctcctgtgcagcctccggattcacctttgaggattatcagatggggtgggtccgccaggctccagggaagggtctagagtgggtctcatcgatttcggctatgggtaatcggacatactacgcagactccgtgaagggccggttcaccatctcccgcgacgattccaagaacacgctgtatctgcaaatgaacagcctgcgtgccgaggacaccgcggtatattactgtgcggaaaatctggttaggattgcgggggatcggtggatgtttgactactggggtcagggaaccctggtcaccgtctcgagc

SEQ ID NO: 765 - DNA, 369 bp, Artificial Sequence
  Chemically synthesized ABT2-65-176
gaggtgcagctgttggagtctgggggaggcttggtacagcctggggggtccctgcgtctctcctgtgcagcctccggattcacctttgaggattatcagatggggtgggtccgccaggctccagggaagggtctagagtgggtctcatcgatttcggctatgggtagtcggacatactacgcagactccgtgaagggccggttcaccatctcccgcgacgattccaagaacacgctgtatctgcaaatgaacagcctgcgtgccgaggacaccgcggtatattactgtgcggaaaatctggttaaggtggcgcggggtcgttggatgtttgactactggggtcagggaaccctggtcaccgtctcgagc

SEQ ID NO: 766 - DNA, 369 bp, Artificial Sequence
  Chemically synthesized ABT2-65-177
gaggtgcagctgttggagtctgggggaggcttggtacagcctggggggtccctgcgtctctcctgtgcagcctccggattcacctttgaggattatcagatggggtgggtccgccaggctccagggaagggtctagagtgggtctcatcgatttcggctatgggtaatcggacatactacgcagactccgtgaagggccggttcaccatctcccgcgacgattccaagaacacgctgtatctgcaaatgaacagcttgcgtgccgaggacaccgcggtatattactgtgcgcaaaatctggttaggtttaaggtgctgcagtggatgtttgactactggggtcagggaaccctggtcaccgtctcgagc

SEQ ID NO: 767 - DNA, 369 bp, Artificial Sequence
  Chemically synthesized ABT2-65-500
gaggtgcagctgttggagtctgggggaggcttggtacagcctggggggtccctgcgtctctcctgtgtagcctccggattcacctttgaggattatcagatggggtgggtccgccaggctccagggaagggtctagagtgggtctcatcgatttcggctatgggtaatcggacatactacgcagactccgtgaagggccggttcaccatctcccgcgacggttccaagaacacgctgtatctgcaaatgaacagcctgcgtgccgaggacaccgcggtatattactgtgcgcaaaatctggttaggctgggggggtctaggtggatgtttgactactggggtcagggaaccctggtcaccgtcttgagc

SEQ ID NO: 768 - DNA, 369 bp, Artificial Sequence
  Chemically synthesized ABT2-65-501
gaggtgcagctgttggagtctgggggaggcttggtacagcctggggggtccctgcgtctctcctgtgtagcctccggattcgcctttgaggattatcagatggggtgggtccgccaggctccagggaagggtctagagtgggtctcatcgatttcggctatgggtaatcggacatactacgcagactccgtgaggggccggttcaccatctcccgcgacggttccaagaacacgctgtatctgcaaatgaacagcctgcgtgccgaggacaccgcggcatattactgtgcgcaaaatctggttaggctggggaggtctaggtgggtgtttgactactggggtcagggaaccctggtcaccgtctcgagc

SEQ ID NO: 769 - DNA, 369 bp, Artificial Sequence
  Chemically synthesized ABT2-65-502
gaggtgcagctgttggagtctgggggaggcttggtacagcctggggggtccctgcgtctctcctgtgtagcctccggattcacctttgaggattatcagatggggtgggtccgccaggctccagggaagggtctagagtgggtctcatcggtttcggctatgggtaatcggacatactacgcagactccgtgaagggccggttcaccatttcccgcgacggttccaagaacacgctgtatctgcaaatgaacagcctgcgtgccgaggacaccgcggtatattactgtgcgcaaaatctggttaggctggggaggtctaggtggatgtttgactactggggtcagggaaccctggtcaccgtctcgagc

SEQ ID NO: 770 - DNA, 369 bp, Artificial Sequence
  Chemically synthesized ABT2-65-503
gaggtgcagctgttggagtctgggggaggcttggtacagcctggggggtccctgcgtctctcctgtgtagcctccggattcacctttgaggattatcagatggggtgggtccgccaggctccagggaagggtctagagcgggtctcatcggtttcggctatgggtaatcggacacactacgcagactccgtgaagggccggttcaccatctcccgcgacgattccaagaacacgctgtatctgcaaatgaacagcctgcgtgccggggacaccgcggtatattactgtgcgcaaaatctggttaggctggggaggtctaggtggatgtttgactactggggtcagggaaccctggtcaccgtctcgagc

SEQ ID NO: 771 - DNA, 369 bp, Artificial Sequence; identical to SEQ ID NO: 770
  Chemically synthesized ABT2-65-504

SEQ ID NO: 772 - DNA, 369 bp, Artificial Sequence
  Chemically synthesized ABT2-65-505
gaggtgcagctgttggagtctgggggaggcttggtacagcctggggggtccctgcgtctctcctgtgtagcctccggattcacctttgaggattatcggatggggtgggtccgccaggctccagggaagggtctagagtgggtctcatcggtttcggctatgggtaatcggacatactacgcagactccgtgaagggccggttcaccatctcccgcgacggttccaagaacacgctgtatctgcaaatgaacagcctgcgtgccgaggacaccgcggtatattactgtgcgcaaaatctggttaagctggggaggtctaggtggatgtttgactactggggtcagggaaccctggtcaccgtctcgagc

SEQ ID NO: 773 - DNA, 369 bp, Artificial Sequence
  Chemically synthesized ABT2-65-506
gaggtgcagctgttggagtctgggggaggcttggtacggcctggggggtccctgcgtctctcctgtgtagcctccggattcacctttgaggattatcagatggggtgggtccgccaggctccagggaagggtctagagtgggtctcatcgatttcggctatgggtaatcggacatactacgcagactccgtgaagggccggttcaccatctcccgcgacgattccaagaacacgctgtatctgcaaatgaacagcctgcgtgccgaggacaccgcggtatattgctgtgcgcaaaatctggttaggctggggaggtctaggtggatgtttgactactggggtcagggaaccctggtcaccgtctcaagc

SEQ ID NO: 774 - DNA, 369 bp, Artificial Sequence
  Chemically synthesized ABT2-65-507
gaggtgcagctgttggagtctgggggaggcttggtacagcctggggggtccctgcgtctcccctgtgtagcctccggattcacctttgaggattgtcagatggggtgggtccgccaggctccagggaagggtctagagtgggtctcatcgatttcggctatgggtaatcggacatactacgcagactccgtgaagggccggttcaccatttcccgcgacaattccaagaacacgctgtatctgcaaatgaacagcctgcgtgccgaggacaccgcggtatattactgtgcgcaaaatctggttaggctggggaggtctaggtggatgtttgactactggggtcagggaaccctggtcaccgtctcgagc

SEQ ID NO: 775 - DNA, 369 bp, Artificial Sequence
  Chemically synthesized ABT2-65-508
gaggtgcagctgttggagtctgggggaggcttggtacagcctggggggtccctgcgtctctcctgtgtagcctccggattcccctttgaggattatcagatggggtgggtccgccaggctccaggggagggtctagagtgggcctcatcgatttcggctatgggtaatcggacatactacgcagactccgtgaagggccggttcaccatctcccgcaacgattccaagaacacgctgtatctgcaaatgaacagcctgcgtgccgaggacaccgcggtatattactgtgcgcaaaatctggttaggctgggggggtctaggtggatgtttgactactggggtcagggaaccctggtcaccgtctcgagc

SEQ ID NO: 776 - DNA, 369 bp, Artificial Sequence
  Chemically synthesized ABT2-65-509
gaggtgcagctgttggagtctgggggaggcttggtacagcctggggggtccctgcgtctctcctgtgtagcctccggattcacctttgaggattatcagatggggtgggtccgccaggctccagggaagggtctagagtgggtctcatcgatttcggctatgggtaatcggacatactacgcagactccgtgaagggccggttcaccatctcccgcgacgattccaagaacacgctgtatctgcaaatgaacagcctgcgtgccgaggacgccgcggtatattactgtgcgcaaaatctggttaggctggggaggtctaggtggatgtttgactactggggtcagggaaccctggtcaccgtctctagc

SEQ ID NO: 777 - DNA, 369 bp, Artificial Sequence
  Chemically synthesized ABT2-65-510
gaggtgcagctgttggagtctgggggaggcttggtacagcctggggggtccctgcgtctctcctgtgtagcctccggattcacctttgaggattatcagatggggtgggtccgccaggctccagggaagggtctagagtgggtctcatcgatttcggctatgggtaatcggacatactacgcagactccgtgaagggccggttcaccatctcccgcgacgattccgagaacacgctgtatctgcaaatgaacagcctgcgtgccgaggacaccgcggtatattactgtgcgcaaaatctggttaggctggggaggtctaggtggatgtttgactactggggtcagggaaccctggtcaccgtctcgagc

SEQ ID NO: 778 - DNA, 369 bp, Artificial Sequence
  Chemically synthesized ABT2-65-511
gaggtgcagctgttggagtctgggggaggcttggtacagcctggggggtccctgcgtccctcctgtgtagcctccggattcacctttggggattatcagatggggtgggtccgccaggctccagggaagggtctagagtgggtctcatcgatttcggctatgggtagtcggacatactacgcagactccgtgaagggccggttcaccatctcccgcgacgattccaagaacacgctgtatctgcaaatgaacagcctgcgtgccgaggacaccgcggtatattactgtgcgcaaaatctggttaggctggggaggtctaggtggatgtttgaccactggggtcagggaaccctggtcaccgtctcgagc

SEQ ID NO: 779 - DNA, 369 bp, Artificial Sequence
  Chemically synthesized ABT2-65-512
gaggtgcagctgttggagtctgggggaggcttggtacagcctggggggtccctgcgtctctcctgtgtagcctccggattcacctttgaggattatcagatggggtgggtccaccaggctccagggaagggtctagagtgggtctcatcgatttcggctatgggtaatcggacatactacgcagactccgtgaagggccggttcaccatctcccgcgacgattccaagaacacgctgtatctgcaaatgaacagcctgcgtgccgaggacaccgcggtatattactgtgcgcaaaatctggttaggctggggaggtctaggtggatgtttgactactggggtcagggaaccctggtcaccgtctcgagc

SEQ ID NO: 780 - DNA, 369 bp, Artificial Sequence
  Chemically synthesized ABT2-65-513
gaggtgcagctgttggagtctgggggaggcttggtacagcctggggggtccctgcgtctctcctgtgtagcctccggattcacctttgaggattatcagatggggtgggtccgccaggctccagggaagggtctagagtgggtctcatcgatttcggctgtgggtaatcggacatactacgcagactccgtgaagggccggttcaccatctcccgcgacgattccaagaacacgctgtatctgcaaatgaacagcctgcgtgccgaggacaccgcggtatattactgtgcgcagaatctggttaggctggggaggtctaggcggatgtttgactactggggtcagggaaccctggtcaccgtctcgagc

SEQ ID NO: 781 - DNA, 369 bp, Artificial Sequence
  Chemically synthesized ABT2-65-514
gaggtgcagctgttggagtctggggggggcttggtacagcctggggggtccctgcgtctctcctgtgtagcctccggattcacctttgaggattatcaaatggggtgggcccgccaggctccagggaagggtctagagtgggtctcatcgatttcggctatgggtaatcggacatactacgcagactccgtgaagggccggttcaccatctcccgcgacgattccaagaacacgctgtatctgcaaatgaacagcctgcgtgccgaggacaccgcggtatattactgtgcgcaaaatctggttaggctggggaggtctaggtggatgtttgactactggggtcagggaaccctggtcaccgtctcgagc

SEQ ID NO: 782 - DNA, 369 bp, Artificial Sequence
  Chemically synthesized ABT2-65-515
gagtgcagctgttggaggtctgggggaggcttggtacagcctggggggtccctgcgtctctcctgtgtagcctccggattcacctttgaggattatcagatggggtgggtccgccaggctccagggaagggtctagagtgggtctcatcgatttcggctatgggtaatcggacatactacgcagactccgtgaagggccggttcaccatctcccgcgacgattccaagaacacgctgtatctgcaaatgaacagcctgcgtgccgaggacaccgcggtatattactgtgcgcaaaatctggttaggctggggaggtctaggtggatgtttgactactggggtcagggaaccctggtcaccgtctcgagc

SEQ ID NO: 783 - DNA, 357 bp, Artificial Sequence
  Chemically synthesized ABT2-66
gaggtgcagctgttggagtctgggggaggcttggtacagcctggggggtccctgcgtctctcctgtgcagcctccggattcaccttttctcattatactatggcgtgggtccgccaggctccagggaagggtctagagtgggtctcaactattggttcttctggtaatagtacatactacgcagactccgtgaagggccggttcaccatctcccgcgacaattccaagaacacgctgtatctgcaaatgaacagcctgcgtgccgaggacaccgcggtatattactgtgcgcaaatgcgggggccgtattatacttttgactaccggggtcagggaaccctggtcaccgtctcgagc

SEQ ID NO: 784 - DNA, 351 bp, Artificial Sequence
  Chemically synthesized ABT2-69
gaggtgcagctgttggagtctgggggaggcttggtacagcctggggggtccctgcgtctctcctgtgcagcctccggattcacctttacgggttatgatatggcttgggtccgccaggctccagggaagggtctagagtgggtctcagtgatttatgcttatggtgagtctacatactacgcagactccgtgaagggccggttcaccatctcccgcgacaattccaagaacacgctgtatctgcaaatgaacagcctgcgtgccgaggataccgcggtatattactgtgcgaaagtgtattcgaatcagtttgactactggggtcagggaaccctggtcaccgtctcgagc

SEQ ID NO: 785 - DNA, 354 bp, Artificial Sequence
  Chemically synthesized ABT2-70
gaggtgcagctgttggagtctgggggaggcttggtacagcctggggggtccctgcgtctctcctgtgcagcctcgggattcacctttagggcttatgatatggggtgggtccgccaggctccagggaggggtctagagtgggtctcagttatttatgcgtggggtactagtacatactacgcagactccgtgaagggccggttcaccatctcccgcgacaattccaagaacacgctgtatctgcaaatgaacagcctgcgtgccgaggacaccgcggtatattactgtgcgaaaacgtctcctaatgcgagttttgactactggggtcagggaaccctggtcaccgtctcgagc

SEQ ID NO: 786 - DNA, 351 bp, Artificial Sequence
  Chemically synthesized ABT2-71
gaggtgcagctgttggagtctgggggaggcttggtacagcctggggggtccctgcgtctctcctgtgcagcctccggattcacctttagggcttatgatatggggtgggtccgccaggctccagggaagggtctagagtgggtctcagttatttatgcgtggggtactagtacatactacgcagactccgtgaagggccggttcaccatctcccgcgacaattccaagaacacgctgtatctgcaaatgaacagcctgcgtgccgaggacaccgcggtatattactgtgcgaaaaggggtcgtcagtcgtttgactactggggtcagggaaccctggtcaccgtctcgagc

SEQ ID NO: 787 - DNA, 351 bp, Artificial Sequence
  Chemically synthesized ABT2-72
gaggtgcagctgttggagtctgggggaggcttggtacagcctggggggtccctgcgtctctcctgtgcagcctccggattcacctttagggcttatgatatggggtgggtccgccaggctccagggaagggtctagagtgggtctcagttatttatgcgtggggtactagtacatactacgcagactccgtgaagggccggttcaccatctcccgcgacaattccaagaacacgctgtatctgcaaatgaacagcctgcgtgccgaggacaccgcggtatattactgtgcgaaaacttcttctgatgggtttgactactggggtcagggaaccctggtcaccgtctcgagc

SEQ ID NO: 788 - DNA, 360 bp, Artificial Sequence
  Chemically synthesized ABT2-73
gaggtgcagctgttggagtctgggggaggcttggtacagcctggggggtccctgcgtctctcctgtgcagcctccggattcacctttagggcttatgatatggggtgggtccgccaggctccagggaagggtctagagtgggtctcagttatttatgcgtggggtactagtacatactacgcagactccgtgaagggccggttcaccatctcccgcgacaattccaagaacacgctgtatctgcaaatgaacagcctgcgtgccgaggacaccgcggtttattactgtgcgaaattttctccgcttagggctcctgtgtttgactactggggtcagggaaccctggtcaccgtctcgagc

SEQ ID NO: 789 - DNA, 357 bp, Artificial Sequence
  Chemically synthesized ABT2-74
gaggtgcagctgttggagtctgggggaggcttggtacagcctggggggtccctgcgtctctcctgtgcagcctccggattcacctttgatctgtatgatatgcattgggtccgccaggctccagggaagggtctagagtgggtctcaacgatttatgcttatggttatgcgacatactacgcagactccgtgaagggccggttcaccatctcccgcgacaattccaagaacacgctgtatctgcaaatgaacagcctgcgtgccgaggataccgcggtatattactgtgcgaaaaagcatggtatgtatgatcattttgactactggggtcagggaaccctggtcaccgtctcgagc

SEQ ID NO: 790 - DNA, 369 bp, Artificial Sequence
  Chemically synthesized ABT2-75
gaggtgcagctgttggagtctgggggaggcttggtacagcctggggggtccctgcgtctctcctgtgcagcctccggattcacctttgggcagtatccgatggcgtgggtccgccaggctccagggaagggtctagagtgggtctcaactatttctccgaagggtgatcgtacatactacgcagactccgtgaagggccggttcaccatctcccgcgacaattccaagaacacgctgtatctgcaaatgaacagcctgcgtgccgaggacaccgcggtatattactgtgcgaaagcgatgtattcgtatcagtataaggagaagggttttgactactggggtcagggaaccctggtcaccgtctcgagc

SEQ ID NO: 791 - DNA, 351 bp, Artificial Sequence
  Chemically synthesized ABT2-99
gaggtgcagctgttggagtctgggggaggcttggtacagcctggggggtccctgcgtctctcctgtacagcctccggattcacctttcgtgattatgatatggggtgggtccgccaggctccagggaagggtctagagtgggtctcagttatttatgcgtggggtactagtacatactacgcagactccgtgaagggccggttcaccatctcccgcgacaattccaagaacacgctgtatctgcaaatgaacagcctgcgtgccgaggataccgcggtatattactgtgcgaaaacttcgtctgttaattttgactactggggtcagggaaccctggtcaccgtctcgagc

SEQ ID NO: 792 - DNA, 351 bp, Artificial Sequence
  Chemically synthesized ABT2-101
gaggtgcagctgttggagtctgggggaggcttggtacagcctggggggtccctgcgtctctcctgtgcagcctccggattcacctttagggcttatgatatggggtgggtccgccaggctccagggaagggtctagagtgggtctcagttatttatgcgtggggtactagtacatactacgcagactccgtgaagggccggttcaccatctcccgcgacaattccaagaacacgctgtatctgcaaatgaacagcctgcgtgccgaggacaccgcggtatattactgtgtgaaacggggggagggtaagtttgactactggggtcagggaaccctggtcaccgtctcgagc

SEQ ID NO: 793 - DNA, 354 bp, Artificial Sequence
  Chemically synthesized ABT2-104
gaggtgcagctgttggagtctgggggaggcttggtacagcctggagggtccctgcgtctctcctgtgcagcctccggattcacctttagggcgtatcggatgggttgggtccgccaggctccagggaagggtctagagtgggtctcatggatttggcctaatggttctcatgcatactacgcagactccgtgaagggccggttcaccatctcccgcgacaattccaagaacacgctgtatctgcaaatgaacagcctgcgtgccgaggacaccgcggtatattactgtgcgcaatttcgtgataatcagcggtttgactaccggggtcagggaaccctggtcaccgtctcgagc

SEQ ID NO: 794 - DNA, 354 bp, Artificial Sequence
  Chemically synthesized ABT2-105
gaggtgcagctgttggagtctgggggaggcttggtacagcctggggggtccctgcgtctctcctgtgcagcctccggattcaccttttttgcttatgagatgtcgtgggtccgccaggctccagggaagggtctagagtgggtctcatctatttcttataatggtactcagacatactacgcagactccgtgaagggccggttcaccatctcccgcgacaattccaagaacacgctgtatctgcaaatgaacagcctgcgtgccgaggataccgcggtatattactgtgcgaaaaggccggatctttcgagttttgactactggggtcagggaaccctggtcaccgtctcgagc

SEQ ID NO: 795 - DNA, 351 bp, Artificial Sequence
  Chemically synthesized ABT2-106
gaggtgcagctgttggagtctgggggaggcttggtacagcctggggggtccctgcgtctctcctgtgcagcctccggattcacctttagtgattatgggatgagttgggtccgccaggctccagggaagggtctagagtgggtctcagctattgctactgatggcgtgtctacatactacgcagactccgtgaagggccggttcaccatctcccgcgacaattccaagaacacgctgtatctgcaaatgaacagcctgcgtgccgaggacaccgcggtatattactgtgcgaaatatttttatccgaattttgactactggggtcagggaaccctggtcaccgtctcgagc

SEQ ID NO: 796 - DNA, 354 bp, Artificial Sequence
  Chemically synthesized ABT2-107
gaggtgcagctgttggagtctgggggaggcttggtacagcctggggggtccctgcgtctctcctgtgcagcctccggattcacctttccgccttatgcgatgggttgggtccgccaggctccagggaagggtctggagtgggtctcattgatttatgagaatggttttaatacatactacgcagactccgtgaagggccggttcaccatctcccgcgacaattccaagaacacgctgtatctgcaaatgaacagcctgcgtgccgaggacaccgcggtatattactgtgcgaaaactttgggttctaatttgtttgactactggggtcagggaaccctggtcaccgtctcgagc

SEQ ID NO: 797 - DNA, 366 bp, Artificial Sequence
  Chemically synthesized ABT2-108
gaggtgcagctgttggagtctgggggaggcttggtacagcctggggggtccctgcgtctctcctgtgcagcctccggattcacctttgctgagtatactatgatgtgggtccgccaggctccagggaagggtctcgagtgggtctcacgtattgggcaggatggtaagaatacatactacgcagactccgtgaagggccggttcaccatctcccgcgacaattccaagaacacgctgtatctgcaaatgaacagcctgcgtgccgaggacaccgcggtatattactgtgcgaaatatacgggtcgggttggtgttcatcatctttttgactactggggtcagggaaccctggtcaccgtctcgagc

SEQ ID NO: 798 - DNA, 366 bp, Artificial Sequence
  Chemically synthesized ABT2-108-533X
gaggtgcagctgttggagtctgggggaggcttggtacagcctggggggtccctgcgtctctcctgtgcagcctccggattcacctttgctgacgaggggatgatgtgggtccgccaggctccagggaaaggtctcgagtgggtctcacgtattgggcaggatggtaagaatacatactacgcagactccgtgaagggccggttcaccatctcccgcgacaattccaagaacacgctgtatctgcaaatgaacagcctgcgtgccgaggacaccgcggtatattactgtgcgaaatatacgggtcggatcctcgggcatcatctttttgactactggggtcagggaaccctggtcaccgtctcgagc

SEQ ID NO: 799 - DNA, 366 bp, Artificial Sequence
  Chemically synthesized ABT2-108-534X
gaggtgcagctgttggagtctgggggaggcttggtacagcctggggggtccctgcgtctctcctgtgcagcctccggattcacctttgctgacgaggggatgatgtgggtccgccaggctccagggaaaggtctcgagtgggtctcacgtattacctacagcggtaagaatacatactacgcagactccgtgaagggccggttcaccatctcccgcgacaattccaagaacacgctgtatctgcaaatgaacagcctgcgtgccgaggacaccgcggtatattactgtgcgaaatatacgggtcggatcttctcccatcatctttttgactactggggtcagggaaccctggtcaccgtctcgagc

SEQ ID NO: 800 - DNA, 366 bp, Artificial Sequence
  Chemically synthesized ABT2-108-537X
gaggtgcagctgttggagtctgggggaggcttggtacagcctggggggtccctgcgtctctcctgtgcagcctccggattcacctttgctgacgaggggatgatgtgggtccgccaggctccagggaagggtctcgagtgggtctcacgtattgggcaggatggtaagaatacatactaccggatggacgtgaagggccggttcaccatctcccgcgacaattccaagaacacgctgtatctgcaaatgaacagcctgcgtgccgaggacaccgcggtatattactgtgcgaaatatacgggtcggatcctcgggcatcatctttttgactactggggtcagggaaccctggtcaccgtctcgagc

SEQ ID NO: 801 - DNA, 366 bp, Artificial Sequence
  Chemically synthesized ABT2-108-538X
gaggtgcagctgttggagtctgggggaggcttggtacagcctggggggtccctgcgtctctcctgtgcagcctccggattcacctttgctgacgaggggatgatgtgggtccgccaggctccagggaagggtctcgagtgggtctcacgtattacctacagcggtaagaatacgtactacgcagactccgtgaagggccggttcaccatctcccgcgacaattccaagaacacgctgtatctgcaaatgaacagcctgcgtgccgaggacaccgcggtatattactgtgcgaaatatacgggtcggatcctcgggcatcatctttttgactactggggtcagggaaccctggtcaccgtctcgagc

SEQ ID NO: 802 - DNA, 366 bp, Artificial Sequence
  Chemically synthesized ABT2-108-620X
gaggtgcagctgttggagtctgggggaggcttggtacagcctggggggtccctgcgtctctcctgtgcagcctccggattcacctttgctgaggagtcgtggatgtgggtccgccaggctccagggaagggtctcgagtgggtctcacgtattgggcaggatggtaagaatacatactaccgcgaggacgtgaagggccggttcaccatctcccgcgacaattccaagaacacgctatatctgcaaatgaacagcctgcgtgccgaggacaccgcggtatattactgtgcgaaatatacgggtcggatcatgggccatcatctttttgactactggggtcagggaaccctggtcaccgtctcgagc

SEQ ID NO: 803 - DNA, 324 bp, Artificial Sequence
  Chemically synthesized ABT2 VK dAbs:ABT2-6
gacatccagatgacccagtctccatcctccctgtctgcatctgtaggagaccgtgtcaccatcacttgccgggcaagtcagagcattgggctactgttaacttggtaccagcagaaaccagggaaagcccctaagctcctgatctatatggcatcccagttgcaaagtggggtcccatcacgtttcagcggcagtggatctgggacagatttcactctcaccatcagcagtctgcaacctgaagattttgctacgtactactgtcaacagtggcatcgtcctcctagtacgttcggccaagggaccaaggtggaaatcaaacgg

SEQ ID NO: 804 - DNA, 324 bp, Artificial Sequence
  Chemically synthesized ABT2-7
gacatccagatgacccagtctccatcctccctgtctgcatctgtaggagaccgtgtcaccatcacttgccgggcaagtcagagcattaagtctgggttaaattggtaccagcagaaaccagggaaagcccctaagctcctgatctatatggcatcccagttgcaaagtggggtcccatcacgtttcagtggcagtggatctgggacagatttcactctcaccatcagcagtctgcaacctgaagattttgctacgtactactgtcaacagtggcatcgtcctcctagtacgttcggccaagggaccaaggtggaaatcaaacgg

SEQ ID NO: 805 - DNA, 324 bp, Artificial Sequence
  Chemically synthesized ABT2-8
gacatccagatgacccagtctccatcctccctgtctgcatctgtaggagaccgtgtcaccatcacttgccgggcaagtcagagcattaagtctatgttagcttggtaccagcagaaaccagggaaagcccctaagctcctgatctatatggcatccaatttgcaaagtggggtcccatcacgtttcagtggcagtggatctgggacagatttcactctcaccatcagcagtctgcaacctgaagattttgctacgtactactgtcaacagactattgttaagccttctacgttcggccaagggactaaggtggaaatcaaacgg

SEQ ID NO: 806 - DNA, 324 bp, Artificial Sequence
  Chemically synthesized ABT2-42
gacatccagatgacccagtctccatcctccctgtctgcatctgtaggagaccgtgtcaccatcacttgccgggcaagtcagtatattgagaagtggttaacttggtatcagcagaaaccagggaaagcccctacgctcctgatctatcgtgggtccttgttgcaaagtggggtcccatcacgtttcagtggcagtggatctgggacagatttcactctcaccatcagcagtctgcaacctgaagattttgctacgtactactgtcaacagactgagtattggccttttacgttcggccaagggaccaaggtggaaatcaaacgg

SEQ ID NO: 807 - DNA, 324 bp, Artificial Sequence
  Chemically synthesized ABT2-43
gacatccagatgacccagtctccatcctccctgtctgcatctgtaggagaccgtgtcaccatcacttgccgggcaagtcagaatattgatacgtatttaacttggtaccagcagaaaccagggaaagcccctaggctcctgatctatggggcttccacgttgcaaagtggggtcccatcacgtttcagtggcagtggatctgggacagatttcactctcaccatcagcagtctgcaacctgaagattttgctacgtactactgtcaacagcgtgcttattatcctacgacgttcggccaagggaccaaggtggaaatcaaacgg

SEQ ID NO: 808 - DNA, 324 bp, Artificial Sequence
  Chemically synthesized ABT2-44
gacatccagatgacccagtctccatcctccctgtctgcatctgtaggagaccgtgtcaccatcacttgccgggcaagtcaggatattggtgagtggttagagtggtatcagcagaaaccagggaaagcccctaagctcctgatctatcgggcgtccactttgcaaagtggggtcccatcacgtttcagtggcagtggatctgggacagatttcactctcaccatcagcagtctgcaacctgaagattttgctacgtactactgtcaacagcatgcgtattatccttttacgttcggccaagggaccaaggtggaaatcaaacgg

SEQ ID NO: 809 - DNA, 324 bp, Artificial Sequence
  Chemically synthesized ABT2-46
gacatccagatgacccagtctccatcctccctgtctgcatctgtaggagaccgtgtcaccatcacttgccgggcaagtcagagtattattgagtggttaagttggtaccagcagaaaccagggaaagcccctaagctcctgatctatcgtacttccgtgttgcaaagtggggtcccatcacgtttcagtggcagtggatctgggacagatttcactctcaccatcagcagtctgcaacctgaagattttgctacgtactactgtcaacagaatgagttttggccttttacgttcggccaagggaccaaggtggaaatcaaacgg

SEQ ID NO: 810 - DNA, 324 bp, Artificial Sequence
  Chemically synthesized ABT2-53
gacatccagatgacccagtctccatcctccctgtctgcatctgtaggagaccgtgtcaccatcacttgccgggcaagtcagagcattaagaagcatttagcgtggtaccagcagaaaccagggaaagcccctaagctcctgatctataatgcatccaagttgcaaagtggggtcccatcacgtttcagtggcagtggatctgggacagatttcactctcaccatcagcagtctgcaacctgaagattttgctacgtactactgtcaacagactaagcgggagcctaagacgtttggccaagggaccaaggtggaaatcaaacgg

SEQ ID NO: 811 - DNA, 324 bp, Artificial Sequence; identical to SEQ ID NO: 804
  Chemically synthesized ABT2-54

SEQ ID NO: 812 - DNA, 324 bp, Artificial Sequence
  Chemically synthesized ABT2-55
gacatccagatgacccagtctccatcctccctgtctgcatctgtaggagaccgtgtcaccatcacttgccgggcaagtcagagcattaagactaggttaaattggtaccagcagaaaccagggaaagcccctaagctcctgatctatctggcatcccgtttgcaaagtggggtcccatcacgtttcagtggcagtggatctgggacagatttcactctcaccatcagcagtctgcaacctgaagattttgctacgtactactgtcaacaggtgtggcgtcttcctagtacgttcggccaagggaccaaggtggaaatcaaacgg

SEQ ID NO: 813 - DNA, 324 bp, Artificial Sequence
  Chemically synthesized ABT2-56
gacatccagatgacccagtctccatcctccctgtctgcatctgtaggagaccgtgtcaccatcacctgccgggcaagtcagagcattgggaggcggttaagttggtaccagcagaaaccagggaaagcccctaagctcctgatctataaggcatcccgtttgcaaagtggggtcccatcacgtttcagtggcagtggatctgggacagatttcactctcaccatcagcagtctgcaacctgaagattttgctacgtactactgtcaacagcgtgttagtgttcctcggacgttcggccaagggaccaaggtggaaatcaaacgg

SEQ ID NO: 814 - DNA, 324 bp, Artificial Sequence
  Chemically synthesized ABT2-57
gacatccagatgacccagtctccatcctccctgtctgcatctgtaggagaccgtgtcaccatcacttgccgggcaagtcagagcattgcgcgtcagttagcgtggtaccagcagaaaccagggaaagcccctaagctcctgatctataaggcatcccggttgcaaagtggggtcccatcacgtttcagtggcagtggatctgggacagatttcactctcaccatcagcagtctgcaacctgaagattttgctacgtactactgtcaacagtatcggatgcggcctaagacgttcggccaagggaccaaggtggaaatcaaacgg

SEQ ID NO: 815 - DNA, 324 bp, Artificial Sequence
  Chemically synthesized ABT2-58
gacatccagatgacccagtctccatcctccctgtctgcatctgtaggagaccgtgtcaccatcacttgccgggcaagtcagagcatttctaagaagttagattggtaccagcagaaaccagggaaagcccctaagctcctgatctattcggcatcccatttgcaaagtggggtcccatcacgtttcagtggcagtggatctgggacagatttcactctcaccatcagcagtctgcaacctgaagattttgctacgtactactgtcaacagaggcggcgtaagcctactacgttcggccaagggaccaaggtggaaatcaaacgg

SEQ ID NO: 816 - DNA, 324 bp, Artificial Sequence
  Chemically synthesized ABT2-59
gacatccagatgacccagtctccatcctccctgtctgcatctgtaggagaccgtgtcaccatcacttgccgggctagtcagagcattaatgtatttttatcgtggtaccagcagaaaccagggaaagcccctaagctcctgatctataatgcatccaatttgcaaagtggggtcccatcacgtttcagtggcagtggatctgggacagatttcactctcaccatcagcagtctgcaacctgaagattttgctacgtactactgtcaacagcgggctctttatcctactacgttcggccaagggaccaaggtggaaatcaaacgg

SEQ ID NO: 817 - DNA, 324 bp, Artificial Sequence
  Chemically synthesized ABT2-60
gacatccagatgacccagtctccatcctccctgtctgcatctgtaggagaccgtgtcaccatcacttgccgggcaagtcagagcattagggtttttttatcttggtaccagcagaaaccagggaaagcccctaagctcctgatctataatgcatccaatttgcaaagtggggtcccatcacgtttcagtggcagtggatctgggacagatttcactctcaccatcagcagtctgcaacctgaagattttgctacgtactactgtcaacagcgggctctttatcctactacgttcggccaagggaccaaggtggaaatcaaacgg

SEQ ID NO: 818 - DNA, 324 bp, Artificial Sequence
  Chemically synthesized ABT2-61
gacatccagatgacccagtctccatcctccctgtctgcatctgtaggagaccgtgtcaccatcacttgccgggcaagtcagagcattagggtttttttatcttggtatcagcagaaaccagggaaagcccctaagctcctgatctataacgcatcccatttgcaaagtggggtcccatcacgtttcagtggcagtggatctgggacagatttcactctcaccatcagcagtctgcaacctgaagattttgctacgtactactgtcaacagcgggctctttatcctactacgttcggccaagggaccaaggtggaaatcaaacgg

SEQ ID NO: 819 - DNA, 324 bp, Artificial Sequence
  Chemically synthesized ABT2-62
gacatccagatgacccagtctccatcctccctgtctgcatctgtaggagaccgtgtcaccatcacttgccgggcaagtcagagcattcagacttatttaagttggtatcagcagaaaccagggaaagcccctaagctcctgatctataatgcatccaatttgcaaagtggggtcccatcacgtttcagtggcagtggatctgggacagatttcactctcaccatcagcagtctgcaacctgaagattttgctacgtactactgtcaacagcgggctctttatcctactacgttcggccaagggaccaaggtggaaatcaaacgg

SEQ ID NO: 820 - DNA, 324 bp, Artificial Sequence
  Chemically synthesized ABT2-63
gacatccagatgacccagtctccatcctccctgtctgcatctgtaggagaccgtgtcaccatcacttgccgggcaagtcagagcattagggtttttttatcttggtatcagcagaaaccagggaaagcccctaagctcctgatctataatgcatcctatttgcaaagtggggtcccatcacgtttcagtggcagtggatctgggacagatttcactctcaccatcagcagtctgcaacctgaagattttgctacgtactactgtcaacagcgggctctttatcctactacgttcggccaagggaccaaggtggaaatcaaacgg

SEQ ID NO: 821 - DNA, 324 bp, Artificial Sequence
  Chemically synthesized ABT2-67
gacatccagatgacccagtctccatcctccctgtctgcatctgtaggagaccgagtcaccatcacttgccgggcaagtcagtatattggggagcatttagcttggtaccagcagaaaccggggaaagcccctaagctcctgatctatcataattccgctttgcaaagtggggtcccatcacgtttcagtggcagtggatctgggacagatttcactctcaccatcagcagtctgcaacctgaagattttgctacgtactactgtcaacagcatgcgtttcttcctaatacgttcggccaagggaccaaggtggaaatcaaacgg

SEQ ID NO: 822 - DNA, 324 bp, Artificial Sequence
  Chemically synthesized ABT2-68
gacatccagatgacccagtctccatcctccctgtctgcatctgtaggagaccgtgtcaccatcacttgccgggcaagtcagaatatttggtatcatttaaattggtaccagcagaaaccagggaaagcccctaagctcctgatctatcttggttcccggttgcaaagtggggtcccatcacgtttcagtggcagtggatctgggacagatttcactctcaccatcagcagtctgcaacctgaagatttcgctacgtactactgtcaacagattcatcatgatccttttacgttcggccaagggaccaaggtggaaatcaaacgg

SEQ ID NO: 823 - DNA, 324 bp, Artificial Sequence
  Chemically synthesized ABT2-76
gacatccagatgacccagtctccatcctccctgtctgcatctgtaggagaccgtgtcaccatcacttgccgggcaagtcagtcgattgatcggtggttagcgtggtatcagcagaaaccagggaaagcccctaagctcctgatctatcggggttccattttgcaaagtggggtcccatcacgtttcagtggcagtggatctgggacagatttcactctcaccatcagcagtctgcaacctgaagattttgctacgtactactgtcaacaggttgcgttttggcctcctacgttcggccaagggaccaaggtggaaatcaaacgg

SEQ ID NO: 824 - DNA, 324 bp, Artificial Sequence
  Chemically synthesized ABT2-77
gacatccagatgacccagtctccatcctccctgtctgcatctgtaggagaccgtgtcaccatcacttgccgggcaagtcagaatattggggcgcatttaaagtggtatcagcagaaaccagggaaagcccctaagctcctgatctatcgtacttcccggttgcaaagtggggtcccatcacgtttcagtggcagtggatctgggacagattttactctcaccatcagcagtctgcaacctgaagattttgctacgtactactgtcaacagaatcatactcgtcctcatacgttcggccaagggaccaaggtggaaatcaaacgg

SEQ ID NO: 825 - DNA, 324 bp, Artificial Sequence
  Chemically synthesized ABT2-79
gacatccagatgacccagtctccatcctccctgtctgcatctgtaggagaccgtgtcaccatcacttgccgggcaagtcagcagattggtgagtggttaaattggtatcagcagaaaccagggaaagcccctaagctcctgatctatcggacgtccctgttgcaaagtggggtcccatcacgtttcagtggcagtggatctgggacagatttcactctcaccatcagcagtctgcaacctgaagattttgctacgtactactgtcaacagactaatttttggcctcctacgttcggccaagggaccaaggtggaaatcaaacgg

SEQ ID NO: 826 - DNA, 324 bp, Artificial Sequence
  Chemically synthesized ABT2-80
gacatccagatgacccagtctccatcctccctgtctgcatctgtaggagaccgtgtcaccatcacttgccgggcaagtcaggctatttatcataatttaaagtggtaccagcagaaaccagggaaggcccctaagctcctgatctatcatacgtcctatttgcaaagtggggtcccatcacgtttcagtggcagtggatctgggacagatttcactctcaccatcagcagtctgcaacctgaagattttgctacgtactactgtcaacagacgtgggcttatccttatacgttcggccaagggaccaaggtggaaatcaaacgg

SEQ ID NO: 827 - DNA, 324 bp, Artificial Sequence; identical to SEQ ID NO: 418
  Chemically synthesized ABT2-81

SEQ ID NO: 828 - DNA, 324 bp, Artificial Sequence
  Chemically synthesized ABT2-83
gacatccagatgacccagtctccatcctccctgtctgcatctgtaggagaccgtgtcaccatcacttgccgggcaagtcagcctattcagactaagttagcgtggtatcagcagaaaccagggaaagcccctaagctcctgatctatcataattccattttgcaaagtggggtcccatcacgtttcagtggcagtggatctgggacagatttcactctcaccatcagcagtctgcaacctgaagattttgctacgtactactgtcaacagtttcgtaagcatccttttacgttcggccaagggaccaaggtggaaatcaaacgg

SEQ ID NO: 829 - DNA, 324 bp, Artificial Sequence
  Chemically synthesized ABT2-84
gacatccagatgacccagtctccatcctccctgtctgcatctgtaggagaccgtgtcaccatcacttgccgggcaagtcagattattgatacgtggttaaattggtatcagcagaaaccagggaaagcccttaagctcctgatctatcgtacttcctctttgcaaagtggggtcccatcacgtttcagtggcagtggatctgggacagatttcactctcaccatcagcagtctgcaacctgaagattttgctacgtactactgtcaacagagtaattattggcctgctacgtttggccaagggaccaaggtggaaatcaaacgg

SEQ ID NO: 830 - DNA, 324 bp, Artificial Sequence
  Chemically synthesized ABT2-85
gacatccagatgacccagtctccatcctccctgtctgcatctgtaggagaccgtgtcaccatcacttgccgggcaagtcagaggattcgtaagcgtttaaagtggtatcagcagaaaccagggaaagcccctaagctcctgatctattcgtcgtccaagttgcaaagtggggtcccatcacgtttcagcggcagtggatctgggacagatttcactctcaccatcagcagtctgcaacctgaagattttgctacgtactactgtcaacagaatttttctaagccttcgacgttcggccaagggaccaaggtggaaatcaaacgg

SEQ ID NO: 831 - DNA, 324 bp, Artificial Sequence
  Chemically synthesized ABT2-86
gacatccagatgacccagtctccatcctccctgtctgcatctgtaggagaccgtgtcaccatcacttgccgggcaagtcagagtattaagaagtatttagcttggtatcagcagaaaccagggaaagcccctaagctcctgatctatctggcttccacgttgcaaagtggggtcccatcacgtttcagtggcagtggatctgggacagatttcactctcaccattagcagtctgcaacctgaagatttcgctacgtactactgtcaacagacgctgacgtatccttctacgttcggccaagggactaaggtggaaatcaaacgg

SEQ ID NO: 832 - DNA, 324 bp, Artificial Sequence
  Chemically synthesized ABT2-87
gacatccagatgacccagtctccatcctccctgtctgcatctgtaggagaccgtgtcaccatcacttgccgggcaagtcagtcgattagtgtttatttatcttggtatcagcagaaaccagggaaagcccctaagctcctgatctataatgcttccattttgcaaagtggggtcccatcacgtttcagtggcagtggatctgggacagatttcactctcaccatcagcagtctgcaacctgaagattttgctacgtactactgtcaacagagggctcattatcctactacgttcggccaagggaccaaggtggaaatcaaacgg

SEQ ID NO: 833 - DNA, 324 bp, Artificial Sequence
  Chemically synthesized ABT2-88
gacatccagatgacccagtctccatcctccctgtctgcatctgtaggagaccgtgtcaccatcacttgccgggcaagtcagtctattgatgagtggttagagtggtaccagcagaaaccagggaaagcccctaagctcctgatctatcgtgcgtcccgtttgcaaagtggggtcccatcacgtttcagtggcagtggatctgggacagatttcactctcaccatcagcaatctgcaacctgaagattttgctacgtactactgtcaacaggcggcttcgtggcctcgtacgttcggccaagggaccaaggtggaaatcaaacgg

SEQ ID NO: 834 - DNA, 324 bp, Artificial Sequence; identical to SEQ ID NO: 823
  Chemically synthesized ABT2-89

SEQ ID NO: 835 - DNA, 324 bp, Artificial Sequence
  Chemically synthesized ABT2-90
gacatccagatgactcagtctccatcctccctgtctgcatctgtaggagaccgtgtcaccatcacttgccgggcaagtcagaatattgatcagtggttagcgtggtaccagcagaaaccagggaaagcccctaagctcctgatctatcggacgtcccgtttgcaaagtggggtcccatcacgtttcagtggcagtggatccgggacagatttcactctcaccatcagcagtctgcaacctgaagatttcgctacgtactactgtcaacaggttgctgcgtttcctgctacgttcggccaagggaccaaggtggaaatcaaacgg

SEQ ID NO: 836 - DNA, 324 bp, Artificial Sequence
  Chemically synthesized ABT2-91
gacatccagatgacccagtctccatcctccctgtctgcatctgtaggagaccgtgtcaccatcacttgccgggcaagtcagcttattgggaagcatttaaattggtatcagcagaaaccagggaaagcccctaagctcctgatctatcatgagtccgctttgcaaagtggggtcccatcacgtttcagtggcagtggatctgggacagatttcactctcaccatcagcagtctgcaacctgaagattttgctacgtactactgtcaacagcatgcgttttctcctcatacgttcggccaagggaccaaggtggaaatcaaacgg

SEQ ID NO: 837 - DNA, 324 bp, Artificial Sequence
  Chemically synthesized ABT2-93
gacatccagatgacccaggctccatcctccctgtctgcatcagtaggagaccgtgtcaccatcacttgccgggcaagtcagtcgattggtccgcatttaaattggtaccagcagaaaccagggaaagcccctaagctcctgatctatcatatttccactttgcaaagtggggtcccatcacgtttcagtggcagtggatctgggacagatttcactctcaccatcagcagtccgcaacctgaagattttgctacgtactactgtcagcagcatgcgttttctcctcatacgttcggccaagggaccaaggtggaaatcaaacgg

SEQ ID NO: 838 - DNA, 324 bp, Artificial Sequence
  Chemically synthesized ABT2-94
gacatccagatgacccagtctccatcctccctgtctgcatctgtaggagaccgtgtcaccatcacttgccgggcaagtcaggcgattggtattcatttagattggtaccagcagaaaccagggaaagcccctaagctcctgatctatgatacttcctctttgcaaagtggggtcccatcacgtttcagtggcagtggatctgggacagatttcactctcaccatcagcagtctgcaacctgaagattttgctacgtactactgtcaacagcatgcgcttttgcctcatacgttcggccaagggaccaaggtggaaatcaaacgg

SEQ ID NO: 839 - DNA, 324 bp, Artificial Sequence
  Chemically synthesized ABT2-95
gacatccagatgacccagtctccatcctccctgtctgcatctgtaggagaccgtgtcaccatcacttgccgggcaagtcagtttattggtcattatttagcttggtatcagcagaaaccagggaaagcccctaagctcctgatctatccggcgtccaagttgcaaagtggggtcccatcacgtttcagtggcagtggatctgggacagatttcactctcaccatcagcagtctgcaacctgaagattttgctacgtactactgtcaacagacttatctgaatcctacgacgttcggccaagggaccaaggtggaaatcaaacgg

SEQ ID NO: 840 - DNA, 324 bp, Artificial Sequence
  Chemically synthesized ABT2-96
gacatccagatgacccagtctccatcctccctgtctgcatctgtaggagaccgtgtcaccatcacttgccgggcaagtcagggtattaagaggaagttaaagtggtaccagcagaaaccagggaaagcccctaagctcctgatctatcaggcttcccgtttgcaaagtggggtcccatcacgtttcagtggcagtggatctgggacagatttcactctcaccatcagcagtctgcaacctgaagattttgctacgtactactgtcaacagaatgcgcagcgtccttttacgttcggccaagggaccaaggtggaaatcaaacgg

SEQ ID NO: 841 - DNA, 324 bp, Artificial Sequence
  Chemically synthesized ABT2-97
gacatccagatgacccagtctccatcctccctgtctgcatctgtaggagaccgtgtcaccatcacttgccgggcaagtcagcagattgatcagtggttatcgtggtaccagcagaaaccagggaaagcccctaagctcctgatctatcggacttccttgttgcaaagtggggtcccatcacgtttcagtggcagtggatctgggacagatttcactctcaccatcagcagcctgcaacctgaagattttgctacgtactactgtcaacaggctgagtattggccttttacgttcggccaagggaccaaggtggaaatcaaacgg

SEQ ID NO: 842 - DNA, 324 bp, Artificial Sequence
  Chemically synthesized ABT2-98
gacatccagatgacccagtctccatcctccctgtctgcatctgtaggagaccgtgttaccatcacttgccgggcaagtcagtatattggtaataatttacattggtaccagcagaaaccagggaaagcccctaagctcctgatctataaggggtccaagttgcaaagtggggtcccatcacgtttcagtggcagtggatctgggacagatttcactctcaccatcagcagtctgcaacctgaagatttcgctacgtactactgtcaacagaattctgctcgtcctcatacgttcggccaagggaccaaggtggaaatcaaacgg

SEQ ID NO: 843 - DNA, 351 bp, Artificial Sequence
  Chemically synthesized ABT1-138
gaggtgcagctgttggagtctgggggaggcttggtacagcctggggggtccctgcgtctctcctgtgcagcctccggattcacctttaatgagtatcttatgtattgggtccgccaggctccagggaagggtctggagtgggtctcatctattagtccgcttggttatcatacatactacgcagactccgtgaagggccggttcaccatctcccgcgacaattccaagaacacgctgtatctgcaaatgaacagcctgcgtgccgaggacaccgcggtatattactgtgcgaaacgtgctcggtggtattttgactactggggtcagggaaccctggtcaccgtctcgagc

SEQ ID NO: 844 - DNA, 7360 bp, Artificial Sequence
  Chemically synthesized sequence pBOS-hCg1,z,non-a, mut (234, 235)
tcaggtgtcgtgaggaattctctagagatccctcgacctcgagatccattgtgcccgggcgccaccatggagtttgggctgagctggctttttcttgtcgcgattttaaaaggtgtccagtgcgcatggtatgccgaaagggatgctgaaattgagaacgaaaagctgcgccgggaggttgaagaactgcggcaggccagcgaggcagatctccagccaggaactattgagtacgaacgccatcgacttacgcgtgcgcaggccgacgcacaggaactgaagaatgccagagactccgctgaagtggtggaaaccgcattctgtactttcgtgctgtcgcggatcgcaggtgaaattgccagtattctcgacgggctccccctgtcggtgcagcggcgttttccggaactggaaaaccgacatgttgatttcctgaaacgggatatcatcaaagccatgaacaaagcagccgcgctggatgaactgataccggggttgctgagtgaatatatcgaacagtcaggttaacaggctgcggcattttgtccgcgccgggcttcgctcactgttcaggccggagccacagaccgccgttgaatgggcggatgctaattactatctcccgaaagaatccgcataccaggaagggcgctgggaaacactgccctttcagcgggccatcatgaatgcgatgggcagcgactacatccgtgaggtgaatgtggtgaagtctgcccgtgtcggttattccaaaatgctgctgggtgtttatgcctactttatagagcataagcagcgcaacacccttatctggttgccgacggatggtgatgccgagaactttatgaaaacccacgttgagccgactattcgtgatattccgtcgctgctggcgctggccccgtggtatggcaaaaagcaccgggataacacgctcaccatgaagcgtttcactaatgggcgtggcttctggtgcctgggcggtaaagcggcaaaaaactaccgtgaaaagtcggtggatgtggcgggttatgatgaacttgctgcttttgatgatgatattgaacaggaaggctctccgacgttcctgggtgacaagcgcgtcgaccaagggcccatcggtcttccccctggcaccctcctccaagagcacctctgggggcacagcggccctgggctgcctggtcaaggactacttccccgaaccggtgacggtgtcgtggaactcaggcgccctgaccagcggcgtgcacaccttcccggctgtcctacagtcctcaggactctactccctcagcagcgtggtgaccgtgccctccagcagcttgggcacccagacctacatctgcaacgtgaatcacaagcccagcaacaccaaggtggacaagaaagttgagcccaaatcttgtgacaaaactcacacatgcccaccgtgcccagcacctgaagccgcggggggaccgtcagtcttcctcttccccccaaaacccaaggacaccctcatgatctcccggacccctgaggtcacatgcgtggtggtggacgtgagccacgaagaccctgaggtcaagttcaactggtacgtggacggcgtggaggtgcataatgccaagacaaagccgcgggaggagcagtacaacagcacgtaccgtgtggtcagcgtcctcaccgtcctgcaccaggactggctgaatggcaaggagtacaagtgcaaggtctccaacaaagccctcccagcccccatcgagaaaaccatctccaaagccaaagggcagccccgagaaccacaggtgtacaccctgcccccatcccgcgaggagatgaccaagaaccaggtcagcctgacctgcctggtcaaaggcttctatcccagcgacatcgccgtggagtgggagagcaatgggcagccggagaacaactacaagaccacgcctcccgtgctggactccgacggctccttcttcctctacagcaagctcaccgtggacaagagcaggtggcagcaggggaacgtcttctcatgctccgtgatgcatgaggctctgcacaaccactacacgcagaagagcctctccctgtctccgggtaaatgagcggccgcgactctagagtgagggtccccacctgggacccttgagagtatcaggtctcccacgtgggagacaagaaatccctgtttaatatttaaacagcagtgttccccatctgggtccttgcacccctcactctggcctcagccgactgcacagcggcccctgcatccccttggctgtgaggcccctggacaagcagaggtggccagagctgggaggcatggccctggggtcccacgaatttgctggggaatctcgtttttcttcttaagacttttgggacatggtttgactcccgaacatcaccgacgtgtctcctgtttttctgggtggcctcgggacacctgccctgcccccacgagggtcaggactgtgactctttttagggccaggcaggtgcctggacatttgccttgctggacggggactggggatgtgggagggagcagacaggaggaatcatgtcaggcctgtgtgtgaaaggaagctccactgtcaccctccacctcttcaccccccactcaccagtgtcccctccactgtcacattgtaactgaacttcaggataataaagtgtttgcctccaaaaaaaaaaaaaaaaaaaaaaaaaaaaaaaaaaaaaaaaaaaaaaaaaaaaaaaaaaaaaaaaaaaaaaaaaaaaaaaccgaattcactggccgtcgttttacaacgtcgtgactgggaaaaccctggcgttacccaacttaatcgccttgcagcacatccccctttcgccagctggcgtaatagcgaagaggcccgcaccgatcgcccttcccaacagttgcgcagcctgaatggcgaatggcgcctgatgcggtattttctccttacgcatctgtgcggtatttcacaccgcatacgtcaaagcaaccatagtacgcgccctgtagcggcgcattaagcgcggcgggtgtggtggttacgcgcagcgtgaccgctacacttgccagcgccttagcgcccgctcctttcgctttcttcccttcctttctcgccacgttcgccggctttccccgtcaagctctaaatcgggggctccctttagggttccgatttagtgctttacggcacctcgaccccaaaaaacttgatttgggtgatggttcacgtagtgggccatcgccctgatagacggtttttcgccctttgacgttggagtccacgttctttaatagtggactcttgttccaaactggaacaacactcaactctatctcgggctattcttttgatttataagggattttgccgatttcggtctattggttaaaaaatgagctgatttaacaaaaatttaacgcgaattttaacaaaatattaacgtttacaattttatggtgcactctcagtacaatctgctctgatgccgcatagttaagccagccccgacacccgccaacacccgctgacgcgccctgacgggcttgtctgctcccggcatccgcttacagacaagctgtgaccgtctccgggagctgcatgtgtcagaggttttcaccgtcatcaccgaaacgcgcgagacgaaagggcctcgtgatacgcctatttttataggttaatgtcatgataataatggtttcttagacgtcaggtggcacttttcggggaaatgtgcgcggaacccctatttgtttatttttctaaatacattcaaatatgtatccgctcatgagacaataaccctgataaatgcttcaataatattgaaaaaggaagagtatgagtattcaacatttccgtgtcgcccttattcccttttttgcggcattttgccttcctgtttttgctcacccagaaacgctggtgaaagtaaaagatgctgaagatcagttgggtgcacgagtgggttacatcgaactggatctcaacagcggtaagatccttgagagttttcgccccgaagaacgttttccaatgatgagcacttttaaagttctgctatgtggcgcggtattatcccgtattgacgccgggcaagagcaactcggtcgccgcatacactattctcagaatgacttggttgagtactcaccagtcacagaaaagcatcttacggatggcatgacagtaagagaattatgcagtgctgccataaccatgagtgataacactgcggccaacttacttctgacaacgatcggaggaccgaaggagctaaccgcttttttgcacaacatgggggatcatgtaactcgccttgatcgttgggaaccggagctgaatgaagccataccaaacgacgagcgtgacaccacgatgcctgtagcaatggcaacaacgttgcgcaaactattaactggcgaactacttactctagcttcccggcaacaattaatagactggatggaggcggataaagttgcaggaccacttctgcgctcggcccttccggctggctggtttattgctgataaatctggagccggtgagcgtgggtctcgcggtatcattgcagcactggggccagatggtaagccctcccgtatcgtagttatctacacgacggggagtcaggcaactatggatgaacgaaatagacagatcgctgagataggtgcctcactgattaagcattggtaactgtcagaccaagtttactcatatatactttagattgatttaaaacttcatttttaatttaaaaggatctaggtgaagatcctttttgataatctcatgaccaaaatcccttaacgtgagttttcgttccactgagcgtcagaccccgtagaaaagatcaaaggatcttcttgagatcctttttttctgcgcgtaatctgctgcttgcaaacaaaaaaaccaccgctaccagcggtggtttgtttgccggatcaagagctaccaactctttttccgaaggtaactggcttcagcagagcgcagataccaaatactgttcttctagtgtagccgtagttaggccaccacttcaagaactctgtagcaccgcctacatacctcgctctgctaatcctgttaccagtggctgctgccagtggcgataagtcgtgtcttaccgggttggactcaagacgatagttaccggataaggcgcagcggtcgggctgaacggggggttcgtgcacacagcccagcttggagcgaacgacctacaccgaactgagatacctacagcgtgagctatgagaaagcgccacgcttcccgaagggagaaaggcggacaggtatccggtaagcggcagggtcggaacaggagagcgcacgagggagcttccagggggaaacgcctggtatctttatagtcctgtcgggtttcgccacctctgacttgagcgtcgatttttgtgatgctcgtcaggggggcggagcctatggaaaaacgccagcaacgcggcctttttacggttcctggccttttgctggccttttgctcacatgttctttcctgcgttatcccctgattctgtggataaccgtattaccgcctttgagtgagctgataccgctcgccgcagccgaacgaccgagcgcagcgagtcagtgagcgaggaagcggaagagcgcccaatacgcaaaccgcctctccccgcgcgttggccgattcattaatgcagctggcacgacaggtttcccgactggaaagcgggcagtgagcgcaacgcaattaatgtgagttagctcactcattaggcaccccaggctttacactttatgcttccggctcgtatgttgtgtggaattgtgagcggataacaatttcacacaggaaacagctatgaccatgattacgccaagcttaattccctccccagcaggcagaagtatgcaaagcatgcatctcaattagtcagcaaccatagtcccgcccctaactccgcccatcccgcccctaactccgcccagttccgcccattctccgccccatggctgactaattttttttatttatgcagaggccgaggccgcctcggcctctgagctattccagaagtagtgaggaggcttttttggaggcctaggcttttgcaaaaagctttgcaaagatggataaagttttaaacagagaggaatctttgcagctaatggaccttctaggtcttgaaaggagtgggaattggctccggtgcccgtcagtgggcagagcgcacatcgcccacagtccccgagaagttggggggaggggtcggcaattgaaccggtgcctagagaaggtggcgcggggtaaactgggaaagtgatgtcgtgtactggctccgcctttttcccgagggtgggggagaaccgtatataagtgcagtagtcgccgtgaacgttctttttcgcaacgggtttgccgccagaacacaggtaagtgccgtgtgtggttcccgcgggcctggcctctttacgggttatggcccttgcgtgccttgaattacttccacctggctgcagtacgtgattcttgatcccgagcttcgggttggaagtgggtgggagagttcgaggccttgcgcttaaggagccccttcgcctcgtgcttgagttgaggcctggcctgggcgctggggccgccgcgtgcgaatctggtggcaccttcgcgcctgtctcgctgctttcgataagtctctagccatttaaaatttttgatgacctgctgcgacgctttttttctggcaagatagtcttgtaaatgcgggccaagatctgcacactggtatttcggtttttggggccgcgggcggcgacggggcccgtgcgtcccagcgcacatgttcggcgaggcggggcctgcgagcgcggccaccgagaatcggacgggggtagtctcaagctggccggcctgctctggtgcctggcctcgcgccgccgtgtatcgccccgccctgggcggcaaggctggcccggtcggcaccagttgcgtgagcggaaagatggccgcttcccggccctgctgcagggagctcaaaatggaggacgcggcgctcgggagagcgggcgggtgagtcacccacacaaaggaaaagggcctttccgtcctcagccgtcgcttcatgtgactccacggagtaccgggcgccgtccaggcacctcgattagttctcgagcttttggagtacgtcgtctttaggttggggggaggggttttatgcgatggagtttccccacactgagtgggtggagactgaagttaggccagcttggcacttgatgtaattctccttggaatttgccctttttgagtttggatcttggttcattctcaagcctcagacagtggttcaaagtttttttcttccatt

SEQ ID NO: 845 - DNA, 7360 bp, Artificial Sequence
  Chemically synthesized sequence pBOS-hCg1,z,non-a, mut (234, 237)
tcaggtgtcgtgaggaattctctagagatccctcgacctcgagatccattgtgcccgggcgccaccatggagtttgggctgagctggctttttcttgtcgcgattttaaaaggtgtccagtgcgcatggtatgccgaaagggatgctgaaattgagaacgaaaagctgcgccgggaggttgaagaactgcggcaggccagcgaggcagatctccagccaggaactattgagtacgaacgccatcgacttacgcgtgcgcaggccgacgcacaggaactgaagaatgccagagactccgctgaagtggtggaaaccgcattctgtactttcgtgctgtcgcggatcgcaggtgaaattgccagtattctcgacgggctccccctgtcggtgcagcggcgttttccggaactggaaaaccgacatgttgatttcctgaaacgggatatcatcaaagccatgaacaaagcagccgcgctggatgaactgataccggggttgctgagtgaatatatcgaacagtcaggttaacaggctgcggcattttgtccgcgccgggcttcgctcactgttcaggccggagccacagaccgccgttgaatgggcggatgctaattactatctcccgaaagaatccgcataccaggaagggcgctgggaaacactgccctttcagcgggccatcatgaatgcgatgggcagcgactacatccgtgaggtgaatgtggtgaagtctgcccgtgtcggttattccaaaatgctgctgggtgtttatgcctactttatagagcataagcagcgcaacacccttatctggttgccgacggatggtgatgccgagaactttatgaaaacccacgttgagccgactattcgtgatattccgtcgctgctggcgctggccccgtggtatggcaaaaagcaccgggataacacgctcaccatgaagcgtttcactaatgggcgtggcttctggtgcctgggcggtaaagcggcaaaaaactaccgtgaaaagtcggtggatgtggcgggttatgatgaacttgctgcttttgatgatgatattgaacaggaaggctctccgacgttcctgggtgacaagcgcgtcgaccaagggcccatcggtcttccccctggcaccctcctccaagagcacctctgggggcacagcggccctgggctgcctggtcaaggactacttccccgaaccggtgacggtgtcgtggaactcaggcgccctgaccagcggcgtgcacaccttcccggctgtcctacagtcctcaggactctactccctcagcagcgtggtgaccgtgccctccagcagcttgggcacccagacctacatctgcaacgtgaatcacaagcccagcaacaccaaggtggacaagaaagttgagcccaaatcttgtgacaaaactcacacatgcccaccgtgcccagcacctgaagccctgggggcaccgtcagtcttcctcttccccccaaaacccaaggacaccctcatgatctcccggacccctgaggtcacatgcgtggtggtggacgtgagccacgaagaccctgaggtcaagttcaactggtacgtggacggcgtggaggtgcataatgccaagacaaagccgcgggaggagcagtacaacagcacgtaccgtgtggtcagcgtcctcaccgtcctgcaccaggactggctgaatggcaaggagtacaagtgcaaggtctccaacaaagccctcccagcccccatcgagaaaaccatctccaaagccaaagggcagccccgagaaccacaggtgtacaccctgcccccatcccgcgaggagatgaccaagaaccaggtcagcctgacctgcctggtcaaaggcttctatcccagcgacatcgccgtggagtgggagagcaatgggcagccggagaacaactacaagaccacgcctcccgtgctggactccgacggctccttcttcctctacagcaagctcaccgtggacaagagcaggtggcagcaggggaacgtcttctcatgctccgtgatgcatgaggctctgcacaaccactacacgcagaagagcctctccctgtctccgggtaaatgagcggccgcgactctagagtgagggtccccacctgggacccttgagagtatcaggtctcccacgtgggagacaagaaatccctgtttaatatttaaacagcagtgttccccatctgggtccttgcacccctcactctggcctcagccgactgcacagcggcccctgcatccccttggctgtgaggcccctggacaagcagaggtggccagagctgggaggcatggccctggggtcccacgaatttgctggggaatctcgtttttcttcttaagacttttgggacatggtttgactcccgaacatcaccgacgtgtctcctgtttttctgggtggcctcgggacacctgccctgcccccacgagggtcaggactgtgactctttttagggccaggcaggtgcctggacatttgccttgctggacggggactggggatgtgggagggagcagacaggaggaatcatgtcaggcctgtgtgtgaaaggaagctccactgtcaccctccacctcttcaccccccactcaccagtgtcccctccactgtcacattgtaactgaacttcaggataataaagtgtttgcctccaaaaaaaaaaaaaaaaaaaaaaaaaaaaaaaaaaaaaaaaaaaaaaaaaaaaaaaaaaaaaaaaaaaaaaaaaaaaaaaccgaattcactggccgtcgttttacaacgtcgtgactgggaaaaccctggcgttacccaacttaatcgccttgcagcacatccccctttcgccagctggcgtaatagcgaagaggcccgcaccgatcgcccttcccaacagttgcgcagcctgaatggcgaatggcgcctgatgcggtattttctccttacgcatctgtgcggtatttcacaccgcatacgtcaaagcaaccatagtacgcgccctgtagcggcgcattaagcgcggcgggtgtggtggttacgcgcagcgtgaccgctacacttgccagcgccttagcgcccgctcctttcgctttcttcccttcctttctcgccacgttcgccggctttccccgtcaagctctaaatcgggggctccctttagggttccgatttagtgctttacggcacctcgaccccaaaaaacttgatttgggtgatggttcacgtagtgggccatcgccctgatagacggtttttcgccctttgacgttggagtccacgttctttaatagtggactcttgttccaaactggaacaacactcaactctatctcgggctattcttttgatttataagggattttgccgatttcggtctattggttaaaaaatgagctgatttaacaaaaatttaacgcgaattttaacaaaatattaacgtttacaattttatggtgcactctcagtacaatctgctctgatgccgcatagttaagccagccccgacacccgccaacacccgctgacgcgccctgacgggcttgtctgctcccggcatccgcttacagacaagctgtgaccgtctccgggagctgcatgtgtcagaggttttcaccgtcatcaccgaaacgcgcgagacgaaagggcctcgtgatacgcctatttttataggttaatgtcatgataataatggtttcttagacgtcaggtggcacttttcggggaaatgtgcgcggaacccctatttgtttatttttctaaatacattcaaatatgtatccgctcatgagacaataaccctgataaatgcttcaataatattgaaaaaggaagagtatgagtattcaacatttccgtgtcgcccttattcccttttttgcggcattttgccttcctgtttttgctcacccagaaacgctggtgaaagtaaaagatgctgaagatcagttgggtgcacgagtgggttacatcgaactggatctcaacagcggtaagatccttgagagttttcgccccgaagaacgttttccaatgatgagcacttttaaagttctgctatgtggcgcggtattatcccgtattgacgccgggcaagagcaactcggtcgccgcatacactattctcagaatgacttggttgagtactcaccagtcacagaaaagcatcttacggatggcatgacagtaagagaattatgcagtgctgccataaccatgagtgataacactgcggccaacttacttctgacaacgatcggaggaccgaaggagctaaccgcttttttgcacaacatgggggatcatgtaactcgccttgatcgttgggaaccggagctgaatgaagccataccaaacgacgagcgtgacaccacgatgcctgtagcaatggcaacaacgttgcgcaaactattaactggcgaactacttactctagcttcccggcaacaattaatagactggatggaggcggataaagttgcaggaccacttctgcgctcggcccttccggctggctggtttattgctgataaatctggagccggtgagcgtgggtctcgcggtatcattgcagcactggggccagatggtaagccctcccgtatcgtagttatctacacgacggggagtcaggcaactatggatgaacgaaatagacagatcgctgagataggtgcctcactgattaagcattggtaactgtcagaccaagtttactcatatatactttagattgatttaaaacttcatttttaatttaaaaggatctaggtgaagatcctttttgataatctcatgaccaaaatcccttaacgtgagttttcgttccactgagcgtcagaccccgtagaaaagatcaaaggatcttcttgagatcctttttttctgcgcgtaatctgctgcttgcaaacaaaaaaaccaccgctaccagcggtggtttgtttgccggatcaagagctaccaactctttttccgaaggtaactggcttcagcagagcgcagataccaaatactgttcttctagtgtagccgtagttaggccaccacttcaagaactctgtagcaccgcctacatacctcgctctgctaatcctgttaccagtggctgctgccagtggcgataagtcgtgtcttaccgggttggactcaagacgatagttaccggataaggcgcagcggtcgggctgaacggggggttcgtgcacacagcccagcttggagcgaacgacctacaccgaactgagatacctacagcgtgagctatgagaaagcgccacgcttcccgaagggagaaaggcggacaggtatccggtaagcggcagggtcggaacaggagagcgcacgagggagcttccagggggaaacgcctggtatctttatagtcctgtcgggtttcgccacctctgacttgagcgtcgatttttgtgatgctcgtcaggggggcggagcctatggaaaaacgccagcaacgcggcctttttacggttcctggccttttgctggccttttgctcacatgttctttcctgcgttatcccctgattctgtggataaccgtattaccgcctttgagtgagctgataccgctcgccgcagccgaacgaccgagcgcagcgagtcagtgagcgaggaagcggaagagcgcccaatacgcaaaccgcctctccccgcgcgttggccgattcattaatgcagctggcacgacaggtttcccgactggaaagcgggcagtgagcgcaacgcaattaatgtgagttagctcactcattaggcaccccaggctttacactttatgcttccggctcgtatgttgtgtggaattgtgagcggataacaatttcacacaggaaacagctatgaccatgattacgccaagcttaattccctccccagcaggcagaagtatgcaaagcatgcatctcaattagtcagcaaccatagtcccgcccctaactccgcccatcccgcccctaactccgcccagttccgcccattctccgccccatggctgactaattttttttatttatgcagaggccgaggccgcctcggcctctgagctattccagaagtagtgaggaggcttttttggaggcctaggcttttgcaaaaagctttgcaaagatggataaagttttaaacagagaggaatctttgcagctaatggaccttctaggtcttgaaaggagtgggaattggctccggtgcccgtcagtgggcagagcgcacatcgcccacagtccccgagaagttggggggaggggtcggcaattgaaccggtgcctagagaaggtggcgcggggtaaactgggaaagtgatgtcgtgtactggctccgcctttttcccgagggtgggggagaaccgtatataagtgcagtagtcgccgtgaacgttctttttcgcaacgggtttgccgccagaacacaggtaagtgccgtgtgtggttcccgcgggcctggcctctttacgggttatggcccttgcgtgccttgaattacttccacctggctgcagtacgtgattcttgatcccgagcttcgggttggaagtgggtgggagagttcgaggccttgcgcttaaggagccccttcgcctcgtgcttgagttgaggcctggcctgggcgctggggccgccgcgtgcgaatctggtggcaccttcgcgcctgtctcgctgctttcgataagtctctagccatttaaaatttttgatgacctgctgcgacgctttttttctggcaagatagtcttgtaaatgcgggccaagatctgcacactggtatttcggtttttggggccgcgggcggcgacggggcccgtgcgtcccagcgcacatgttcggcgaggcggggcctgcgagcgcggccaccgagaatcggacgggggtagtctcaagctggccggcctgctctggtgcctggcctcgcgccgccgtgtatcgccccgccctgggcggcaaggctggcccggtcggcaccagttgcgtgagcggaaagatggccgcttcccggccctgctgcagggagctcaaaatggaggacgcggcgctcgggagagcgggcgggtgagtcacccacacaaaggaaaagggcctttccgtcctcagccgtcgcttcatgtgactccacggagtaccgggcgccgtccaggcacctcgattagttctcgagcttttggagtacgtcgtctttaggttggggggaggggttttatgcgatggagtttccccacactgagtgggtggagactgaagttaggccagcttggcacttgatgtaattctccttggaatttgccctttttgagtttggatcttggttcattctcaagcctcagacagtggttcaaagtttttttcttccatt

SEQ ID NO: 846 - DNA, 7360 bp, Artificial Sequence
  Chemically synthesized sequence pBOS-hCg1,z,non-a
tcaggtgtcgtgaggaattctctagagatccctcgacctcgagatccattgtgcccgggcgccaccatggagtttgggctgagctggctttttcttgtcgcgattttaaaaggtgtccagtgcgcatggtatgccgaaagggatgctgaaattgagaacgaaaagctgcgccgggaggttgaagaactgcggcaggccagcgaggcagatctccagccaggaactattgagtacgaacgccatcgacttacgcgtgcgcaggccgacgcacaggaactgaagaatgccagagactccgctgaagtggtggaaaccgcattctgtactttcgtgctgtcgcggatcgcaggtgaaattgccagtattctcgacgggctccccctgtcggtgcagcggcgttttccggaactggaaaaccgacatgttgatttcctgaaacgggatatcatcaaagccatgaacaaagcagccgcgctggatgaactgataccggggttgctgagtgaatatatcgaacagtcaggttaacaggctgcggcattttgtccgcgccgggcttcgctcactgttcaggccggagccacagaccgccgttgaatgggcggatgctaattactatctcccgaaagaatccgcataccaggaagggcgctgggaaacactgccctttcagcgggccatcatgaatgcgatgggcagcgactacatccgtgaggtgaatgtggtgaagtctgcccgtgtcggttattccaaaatgctgctgggtgtttatgcctactttatagagcataagcagcgcaacacccttatctggttgccgacggatggtgatgccgagaactttatgaaaacccacgttgagccgactattcgtgatattccgtcgctgctggcgctggccccgtggtatggcaaaaagcaccgggataacacgctcaccatgaagcgtttcactaatgggcgtggcttctggtgcctgggcggtaaagcggcaaaaaactaccgtgaaaagtcggtggatgtggcgggttatgatgaacttgctgcttttgatgatgatattgaacaggaaggctctccgacgttcctgggtgacaagcgcgtcgaccaagggcccatcggtcttccccctggcaccctcctccaagagcacctctgggggcacagcggccctgggctgcctggtcaaggactacttccccgaaccggtgacggtgtcgtggaactcaggcgccctgaccagcggcgtgcacaccttcccggctgtcctacagtcctcaggactctactccctcagcagcgtggtgaccgtgccctccagcagcttgggcacccagacctacatctgcaacgtgaatcacaagcccagcaacaccaaggtggacaagaaagttgagcccaaatcttgtgacaaaactcacacatgcccaccgtgcccagcacctgaactcctggggggaccgtcagtcttcctcttccccccaaaacccaaggacaccctcatgatctcccggacccctgaggtcacatgcgtggtggtggacgtgagccacgaagaccctgaggtcaagttcaactggtacgtggacggcgtggaggtgcataatgccaagacaaagccgcgggaggagcagtacaacagcacgtaccgtgtggtcagcgtcctcaccgtcctgcaccaggactggctgaatggcaaggagtacaagtgcaaggtctccaacaaagccctcccagcccccatcgagaaaaccatctccaaagccaaagggcagccccgagaaccacaggtgtacaccctgcccccatcccgcgaggagatgaccaagaaccaggtcagcctgacctgcctggtcaaaggcttctatcccagcgacatcgccgtggagtgggagagcaatgggcagccggagaacaactacaagaccacgcctcccgtgctggactccgacggctccttcttcctctacagcaagctcaccgtggacaagagcaggtggcagcaggggaacgtcttctcatgctccgtgatgcatgaggctctgcacaaccactacacgcagaagagcctctccctgtctccgggtaaatgagcggccgcgactctagagtgagggtccccacctgggacccttgagagtatcaggtctcccacgtgggagacaagaaatccctgtttaatatttaaacagcagtgttccccatctgggtccttgcacccctcactctggcctcagccgactgcacagcggcccctgcatccccttggctgtgaggcccctggacaagcagaggtggccagagctgggaggcatggccctggggtcccacgaatttgctggggaatctcgtttttcttcttaagacttttgggacatggtttgactcccgaacatcaccgacgtgtctcctgtttttctgggtggcctcgggacacctgccctgcccccacgagggtcaggactgtgactctttttagggccaggcaggtgcctggacatttgccttgctggacggggactggggatgtgggagggagcagacaggaggaatcatgtcaggcctgtgtgtgaaaggaagctccactgtcaccctccacctcttcaccccccactcaccagtgtcccctccactgtcacattgtaactgaacttcaggataataaagtgtttgcctccaaaaaaaaaaaaaaaaaaaaaaaaaaaaaaaaaaaaaaaaaaaaaaaaaaaaaaaaaaaaaaaaaaaaaaaaaaaaaaaccgaattcactggccgtcgttttacaacgtcgtgactgggaaaaccctggcgttacccaacttaatcgccttgcagcacatccccctttcgccagctggcgtaatagcgaagaggcccgcaccgatcgcccttcccaacagttgcgcagcctgaatggcgaatggcgcctgatgcggtattttctccttacgcatctgtgcggtatttcacaccgcatacgtcaaagcaaccatagtacgcgccctgtagcggcgcattaagcgcggcgggtgtggtggttacgcgcagcgtgaccgctacacttgccagcgccttagcgcccgctcctttcgctttcttcccttcctttctcgccacgttcgccggctttccccgtcaagctctaaatcgggggctccctttagggttccgatttagtgctttacggcacctcgaccccaaaaaacttgatttgggtgatggttcacgtagtgggccatcgccctgatagacggtttttcgccctttgacgttggagtccacgttctttaatagtggactcttgttccaaactggaacaacactcaactctatctcgggctattcttttgatttataagggattttgccgatttcggtctattggttaaaaaatgagctgatttaacaaaaatttaacgcgaattttaacaaaatattaacgtttacaattttatggtgcactctcagtacaatctgctctgatgccgcatagttaagccagccccgacacccgccaacacccgctgacgcgccctgacgggcttgtctgctcccggcatccgcttacagacaagctgtgaccgtctccgggagctgcatgtgtcagaggttttcaccgtcatcaccgaaacgcgcgagacgaaagggcctcgtgatacgcctatttttataggttaatgtcatgataataatggtttcttagacgtcaggtggcacttttcggggaaatgtgcgcggaacccctatttgtttatttttctaaatacattcaaatatgtatccgctcatgagacaataaccctgataaatgcttcaataatattgaaaaaggaagagtatgagtattcaacatttccgtgtcgcccttattcccttttttgcggcattttgccttcctgtttttgctcacccagaaacgctggtgaaagtaaaagatgctgaagatcagttgggtgcacgagtgggttacatcgaactggatctcaacagcggtaagatccttgagagttttcgccccgaagaacgttttccaatgatgagcacttttaaagttctgctatgtggcgcggtattatcccgtattgacgccgggcaagagcaactcggtcgccgcatacactattctcagaatgacttggttgagtactcaccagtcacagaaaagcatcttacggatggcatgacagtaagagaattatgcagtgctgccataaccatgagtgataacactgcggccaacttacttctgacaacgatcggaggaccgaaggagctaaccgcttttttgcacaacatgggggatcatgtaactcgccttgatcgttgggaaccggagctgaatgaagccataccaaacgacgagcgtgacaccacgatgcctgtagcaatggcaacaacgttgcgcaaactattaactggcgaactacttactctagcttcccggcaacaattaatagactggatggaggcggataaagttgcaggaccacttctgcgctcggcccttccggctggctggtttattgctgataaatctggagccggtgagcgtgggtctcgcggtatcattgcagcactggggccagatggtaagccctcccgtatcgtagttatctacacgacggggagtcaggcaactatggatgaacgaaatagacagatcgctgagataggtgcctcactgattaagcattggtaactgtcagaccaagtttactcatatatactttagattgatttaaaacttcatttttaatttaaaaggatctaggtgaagatcctttttgataatctcatgaccaaaatcccttaacgtgagttttcgttccactgagcgtcagaccccgtagaaaagatcaaaggatcttcttgagatcctttttttctgcgcgtaatctgctgcttgcaaacaaaaaaaccaccgctaccagcggtggtttgtttgccggatcaagagctaccaactctttttccgaaggtaactggcttcagcagagcgcagataccaaatactgttcttctagtgtagccgtagttaggccaccacttcaagaactctgtagcaccgcctacatacctcgctctgctaatcctgttaccagtggctgctgccagtggcgataagtcgtgtcttaccgggttggactcaagacgatagttaccggataaggcgcagcggtcgggctgaacggggggttcgtgcacacagcccagcttggagcgaacgacctacaccgaactgagatacctacagcgtgagctatgagaaagcgccacgcttcccgaagggagaaaggcggacaggtatccggtaagcggcagggtcggaacaggagagcgcacgagggagcttccagggggaaacgcctggtatctttatagtcctgtcgggtttcgccacctctgacttgagcgtcgatttttgtgatgctcgtcaggggggcggagcctatggaaaaacgccagcaacgcggcctttttacggttcctggccttttgctggccttttgctcacatgttctttcctgcgttatcccctgattctgtggataaccgtattaccgcctttgagtgagctgataccgctcgccgcagccgaacgaccgagcgcagcgagtcagtgagcgaggaagcggaagagcgcccaatacgcaaaccgcctctccccgcgcgttggccgattcattaatgcagctggcacgacaggtttcccgactggaaagcgggcagtgagcgcaacgcaattaatgtgagttagctcactcattaggcaccccaggctttacactttatgcttccggctcgtatgttgtgtggaattgtgagcggataacaatttcacacaggaaacagctatgaccatgattacgccaagcttaattccctccccagcaggcagaagtatgcaaagcatgcatctcaattagtcagcaaccatagtcccgcccctaactccgcccatcccgcccctaactccgcccagttccgcccattctccgccccatggctgactaattttttttatttatgcagaggccgaggccgcctcggcctctgagctattccagaagtagtgaggaggcttttttggaggcctaggcttttgcaaaaagctttgcaaagatggataaagttttaaacagagaggaatctttgcagctaatggaccttctaggtcttgaaaggagtgggaattggctccggtgcccgtcagtgggcagagcgcacatcgcccacagtccccgagaagttggggggaggggtcggcaattgaaccggtgcctagagaaggtggcgcggggtaaactgggaaagtgatgtcgtgtactggctccgcctttttcccgagggtgggggagaaccgtatataagtgcagtagtcgccgtgaacgttctttttcgcaacgggtttgccgccagaacacaggtaagtgccgtgtgtggttcccgcgggcctggcctctttacgggttatggcccttgcgtgccttgaattacttccacctggctgcagtacgtgattcttgatcccgagcttcgggttggaagtgggtgggagagttcgaggccttgcgcttaaggagccccttcgcctcgtgcttgagttgaggcctggcctgggcgctggggccgccgcgtgcgaatctggtggcaccttcgcgcctgtctcgctgctttcgataagtctctagccatttaaaatttttgatgacctgctgcgacgctttttttctggcaagatagtcttgtaaatgcgggccaagatctgcacactggtatttcggtttttggggccgcgggcggcgacggggcccgtgcgtcccagcgcacatgttcggcgaggcggggcctgcgagcgcggccaccgagaatcggacgggggtagtctcaagctggccggcctgctctggtgcctggcctcgcgccgccgtgtatcgccccgccctgggcggcaaggctggcccggtcggcaccagttgcgtgagcggaaagatggccgcttcccggccctgctgcagggagctcaaaatggaggacgcggcgctcgggagagcgggcgggtgagtcacccacacaaaggaaaagggcctttccgtcctcagccgtcgcttcatgtgactccacggagtaccgggcgccgtccaggcacctcgattagttctcgagcttttggagtacgtcgtctttaggttggggggaggggttttatgcgatggagtttccccacactgagtgggtggagactgaagttaggccagcttggcacttgatgtaattctccttggaatttgccctttttgagtttggatcttggttcattctcaagcctcagacagtggttcaaagtttttttcttccatt

SEQ ID NO: 847 - DNA, 7349 bp, Artificial Sequence
  Chemically synthesized sequence pBOS-hCg2,(n-)
tcaggtgtcgtgaggaattctctagagatccctcgacctcgagatccattgtgcccgggcgccaccatggagtttgggctgagctggctttttcttgtcgcgattttaaaaggtgtccagtgcgcatggtatgccgaaagggatgctgaaattgagaacgaaaagctgcgccgggaggttgaagaactgcggcaggccagcgaggcagatctccagccaggaactattgagtacgaacgccatcgacttacgcgtgcgcaggccgacgcacaggaactgaagaatgccagagactccgctgaagtggtggaaaccgcattctgtactttcgtgctgtcgcggatcgcaggtgaaattgccagtattctcgacgggctccccctgtcggtgcagcggcgttttccggaactggaaaaccgacatgttgatttcctgaaacgggatatcatcaaagccatgaacaaagcagccgcgctggatgaactgataccggggttgctgagtgaatatatcgaacagtcaggttaacaggctgcggcattttgtccgcgccgggcttcgctcactgttcaggccggagccacagaccgccgttgaatgggcggatgctaattactatctcccgaaagaatccgcataccaggaagggcgctgggaaacactgccctttcagcgggccatcatgaatgcgatgggcagcgactacatccgtgaggtgaatgtggtgaagtctgcccgtgtcggttattccaaaatgctgctgggtgtttatgcctactttatagagcataagcagcgcaacacccttatctggttgccgacggatggtgatgccgagaactttatgaaaacccacgttgagccgactattcgtgatattccgtcgctgctggcgctggccccgtggtatggcaaaaagcaccgggataacacgctcaccatgaagcgtttcactaatgggcgtggcttctggtgcctgggcggtaaagcggcaaaaaactaccgtgaaaagtcggtggatgtggcgggttatgatgaacttgctgcttttgatgatgatattgaacaggaaggctctccgacgttcctgggtgacaagcgcgtcgaccaagggcccatcggtcttccccctggcgccctgctctagaagcacctccgagagcacagcggccctgggctgcctggtcaaggactacttccccgaaccggtgacggtgtcgtggaactcaggcgctctgaccagcggcgtgcacaccttcccagctgtcctgcagtcctcaggactctactccctcagcagcgtggtgaccgtgccctccagcaacttcggcacccagacctacacatgcaacgtagatcacaagcccagcaacaccaaggtggacaagacagttgagcgcaaatgttgtgtcgagtgcccaccgtgcccagcaccacctgtggcaggaccgtcagtcttcctcttccccccaaaacccaaggacaccctcatgatctcccggacccctgaggtcacgtgcgtggtggtggacgtgagccacgaagaccccgaggtccagttcaactggtacgtggacggcgtggaggtgcataatgccaagacaaagccacgggaggagcagttcaacagcacgttccgtgtggtcagcgtcctcaccgttgtgcaccaggactggctgaacggcaaggagtacaagtgcaaggtctccaacaaaggcctcccagcccccatcgagaaaaccatctccaaaaccaaagggcagccccgagaaccacaggtgtacaccctgcccccatcccgggaggagatgaccaagaaccaggtcagcctgacctgcctggtcaaaggcttctaccccagcgacatcgccgtggagtgggagagcaatgggcagccggagaacaactacaagaccacacctcccatgctggactccgacggctccttcttcctctacagcaagctcaccgtggacaagagcaggtggcagcaggggaacgtcttctcatgctccgtgatgcatgaggctctgcacaaccactacacgcagaagagcctctccctgtctccgggtaaatgacgcggccgcgactctagagtgagggtccccacctgggacccttgagagtatcaggtctcccacgtgggagacaagaaatccctgtttaatatttaaacagcagtgttccccatctgggtccttgcacccctcactctggcctcagccgactgcacagcggcccctgcatccccttggctgtgaggcccctggacaagcagaggtggccagagctgggaggcatggccctggggtcccacgaatttgctggggaatctcgtttttcttcttaagacttttgggacatggtttgactcccgaacatcaccgacgtgtctcctgtttttctgggtggcctcgggacacctgccctgcccccacgagggtcaggactgtgactctttttagggccaggcaggtgcctggacatttgccttgctggacggggactggggatgtgggagggagcagacaggaggaatcatgtcaggcctgtgtgtgaaaggaagctccactgtcaccctccacctcttcaccccccactcaccagtgtcccctccactgtcacattgtaactgaacttcaggataataaagtgtttgcctccaaaaaaaaaaaaaaaaaaaaaaaaaaaaaaaaaaaaaaaaaaaaaaaaaaaaaaaaaaaaaaaaaaaaaaaaaaaaaaaccgaattcactggccgtcgttttacaacgtcgtgactgggaaaaccctggcgttacccaacttaatcgccttgcagcacatccccctttcgccagctggcgtaatagcgaagaggcccgcaccgatcgcccttcccaacagttgcgcagcctgaatggcgaatggcgcctgatgcggtattttctccttacgcatctgtgcggtatttcacaccgcatacgtcaaagcaaccatagtacgcgccctgtagcggcgcattaagcgcggcgggtgtggtggttacgcgcagcgtgaccgctacacttgccagcgccttagcgcccgctcctttcgctttcttcccttcctttctcgccacgttcgccggctttccccgtcaagctctaaatcgggggctccctttagggttccgatttagtgctttacggcacctcgaccccaaaaaacttgatttgggtgatggttcacgtagtgggccatcgccctgatagacggtttttcgccctttgacgttggagtccacgttctttaatagtggactcttgttccaaactggaacaacactcaactctatctcgggctattcttttgatttataagggattttgccgatttcggtctattggttaaaaaatgagctgatttaacaaaaatttaacgcgaattttaacaaaatattaacgtttacaattttatggtgcactctcagtacaatctgctctgatgccgcatagttaagccagccccgacacccgccaacacccgctgacgcgccctgacgggcttgtctgctcccggcatccgcttacagacaagctgtgaccgtctccgggagctgcatgtgtcagaggttttcaccgtcatcaccgaaacgcgcgagacgaaagggcctcgtgatacgcctatttttataggttaatgtcatgataataatggtttcttagacgtcaggtggcacttttcggggaaatgtgcgcggaacccctatttgtttatttttctaaatacattcaaatatgtatccgctcatgagacaataaccctgataaatgcttcaataatattgaaaaaggaagagtatgagtattcaacatttccgtgtcgcccttattcccttttttgcggcattttgccttcctgtttttgctcacccagaaacgctggtgaaagtaaaagatgctgaagatcagttgggtgcacgagtgggttacatcgaactggatctcaacagcggtaagatccttgagagttttcgccccgaagaacgttttccaatgatgagcacttttaaagttctgctatgtggcgcggtattatcccgtattgacgccgggcaagagcaactcggtcgccgcatacactattctcagaatgacttggttgagtactcaccagtcacagaaaagcatcttacggatggcatgacagtaagagaattatgcagtgctgccataaccatgagtgataacactgcggccaacttacttctgacaacgatcggaggaccgaaggagctaaccgcttttttgcacaacatgggggatcatgtaactcgccttgatcgttgggaaccggagctgaatgaagccataccaaacgacgagcgtgacaccacgatgcctgtagcaatggcaacaacgttgcgcaaactattaactggcgaactacttactctagcttcccggcaacaattaatagactggatggaggcggataaagttgcaggaccacttctgcgctcggcccttccggctggctggtttattgctgataaatctggagccggtgagcgtgggtctcgcggtatcattgcagcactggggccagatggtaagccctcccgtatcgtagttatctacacgacggggagtcaggcaactatggatgaacgaaatagacagatcgctgagataggtgcctcactgattaagcattggtaactgtcagaccaagtttactcatatatactttagattgatttaaaacttcatttttaatttaaaaggatctaggtgaagatcctttttgataatctcatgaccaaaatcccttaacgtgagttttcgttccactgagcgtcagaccccgtagaaaagatcaaaggatcttcttgagatcctttttttctgcgcgtaatctgctgcttgcaaacaaaaaaaccaccgctaccagcggtggtttgtttgccggatcaagagctaccaactctttttccgaaggtaactggcttcagcagagcgcagataccaaatactgttcttctagtgtagccgtagttaggccaccacttcaagaactctgtagcaccgcctacatacctcgctctgctaatcctgttaccagtggctgctgccagtggcgataagtcgtgtcttaccgggttggactcaagacgatagttaccggataaggcgcagcggtcgggctgaacggggggttcgtgcacacagcccagcttggagcgaacgacctacaccgaactgagatacctacagcgtgagctatgagaaagcgccacgcttcccgaagggagaaaggcggacaggtatccggtaagcggcagggtcggaacaggagagcgcacgagggagcttccagggggaaacgcctggtatctttatagtcctgtcgggtttcgccacctctgacttgagcgtcgatttttgtgatgctcgtcaggggggcggagcctatggaaaaacgccagcaacgcggcctttttacggttcctggccttttgctggccttttgctcacatgttctttcctgcgttatcccctgattctgtggataaccgtattaccgcctttgagtgagctgataccgctcgccgcagccgaacgaccgagcgcagcgagtcagtgagcgaggaagcggaagagcgcccaatacgcaaaccgcctctccccgcgcgttggccgattcattaatgcagctggcacgacaggtttcccgactggaaagcgggcagtgagcgcaacgcaattaatgtgagttagctcactcattaggcaccccaggctttacactttatgcttccggctcgtatgttgtgtggaattgtgagcggataacaatttcacacaggaaacagctatgaccatgattacgccaagcttaattccctccccagcaggcagaagtatgcaaagcatgcatctcaattagtcagcaaccatagtcccgcccctaactccgcccatcccgcccctaactccgcccagttccgcccattctccgccccatggctgactaattttttttatttatgcagaggccgaggccgcctcggcctctgagctattccagaagtagtgaggaggcttttttggaggcctaggcttttgcaaaaagctttgcaaagatggataaagttttaaacagagaggaatctttgcagctaatggaccttctaggtcttgaaaggagtgggaattggctccggtgcccgtcagtgggcagagcgcacatcgcccacagtccccgagaagttggggggaggggtcggcaattgaaccggtgcctagagaaggtggcgcggggtaaactgggaaagtgatgtcgtgtactggctccgcctttttcccgagggtgggggagaaccgtatataagtgcagtagtcgccgtgaacgttctttttcgcaacgggtttgccgccagaacacaggtaagtgccgtgtgtggttcccgcgggcctggcctctttacgggttatggcccttgcgtgccttgaattacttccacctggctgcagtacgtgattcttgatcccgagcttcgggttggaagtgggtgggagagttcgaggccttgcgcttaaggagccccttcgcctcgtgcttgagttgaggcctggcctgggcgctggggccgccgcgtgcgaatctggtggcaccttcgcgcctgtctcgctgctttcgataagtctctagccatttaaaatttttgatgacctgctgcgacgctttttttctggcaagatagtcttgtaaatgcgggccaagatctgcacactggtatttcggtttttggggccgcgggcggcgacggggcccgtgcgtcccagcgcacatgttcggcgaggcggggcctgcgagcgcggccaccgagaatcggacgggggtagtctcaagctggccggcctgctctggtgcctggcctcgcgccgccgtgtatcgccccgccctgggcggcaaggctggcccggtcggcaccagttgcgtgagcggaaagatggccgcttcccggccctgctgcagggagctcaaaatggaggacgcggcgctcgggagagcgggcgggtgagtcacccacacaaaggaaaagggcctttccgtcctcagccgtcgcttcatgtgactccacggagtaccgggcgccgtccaggcacctcgattagttctcgagcttttggagtacgtcgtctttaggttggggggaggggttttatgcgatggagtttccccacactgagtgggtggagactgaagttaggccagcttggcacttgatgtaattctccttggaatttgccctttttgagtttggatcttggttcattctcaagcctcagacagtggttcaaagtttttttcttccatt

SEQ ID NO: 848 - DNA, 7349 bp, Artificial Sequence
  Chemically synthesized sequence pBOS-hCg2,(n+)
tcaggtgtcgtgaggaattctctagagatccctcgacctcgagatccattgtgcccgggcgccaccatggagtttgggctgagctggctttttcttgtcgcgattttaaaaggtgtccagtgcgcatggtatgccgaaagggatgctgaaattgagaacgaaaagctgcgccgggaggttgaagaactgcggcaggccagcgaggcagatctccagccaggaactattgagtacgaacgccatcgacttacgcgtgcgcaggccgacgcacaggaactgaagaatgccagagactccgctgaagtggtggaaaccgcattctgtactttcgtgctgtcgcggatcgcaggtgaaattgccagtattctcgacgggctccccctgtcggtgcagcggcgttttccggaactggaaaaccgacatgttgatttcctgaaacgggatatcatcaaagccatgaacaaagcagccgcgctggatgaactgataccggggttgctgagtgaatatatcgaacagtcaggttaacaggctgcggcattttgtccgcgccgggcttcgctcactgttcaggccggagccacagaccgccgttgaatgggcggatgctaattactatctcccgaaagaatccgcataccaggaagggcgctgggaaacactgccctttcagcgggccatcatgaatgcgatgggcagcgactacatccgtgaggtgaatgtggtgaagtctgcccgtgtcggttattccaaaatgctgctgggtgtttatgcctactttatagagcataagcagcgcaacacccttatctggttgccgacggatggtgatgccgagaactttatgaaaacccacgttgagccgactattcgtgatattccgtcgctgctggcgctggccccgtggtatggcaaaaagcaccgggataacacgctcaccatgaagcgtttcactaatgggcgtggcttctggtgcctgggcggtaaagcggcaaaaaactaccgtgaaaagtcggtggatgtggcgggttatgatgaacttgctgcttttgatgatgatattgaacaggaaggctctccgacgttcctgggtgacaagcgcgtcgaccaagggcccatcggtcttccccctggcgccctgctctagaagcacctccgagagcacagcggccctgggctgcctggtcaaggactacttccccgaaccggtgacggtgtcgtggaactcaggcgctctgaccagcggcgtgcacaccttcccagctgtcctgcagtcctcaggactctactccctcagcagcgtggtgaccgtgacctccagcaacttcggcacccagacctacacatgcaacgtagatcacaagcccagcaacaccaaggtggacaagacagttgagcgcaaatgttgtgtcgagtgcccaccgtgcccagcaccacctgtggcaggaccgtcagtcttcctcttccccccaaaacccaaggacaccctcatgatctcccggacccctgaggtcacgtgcgtggtggtggacgtgagccacgaagaccccgaggtccagttcaactggtacgtggacggcatggaggtgcataatgccaagacaaagccacgggaggagcagttcaacagcacgttccgtgtggtcagcgtcctcaccgttgtgcaccaggactggctgaacggcaaggagtacaagtgcaaggtctccaacaaaggcctcccagcccccatcgagaaaaccatctccaaaaccaaagggcagccccgagaaccacaggtgtacaccctgcccccatcccgggaggagatgaccaagaaccaggtcagcctgacctgcctggtcaaaggcttctaccccagcgacatcgccgtggagtgggagagcaatgggcagccggagaacaactacaagaccacacctcccatgctggactccgacggctccttcttcctctacagcaagctcaccgtggacaagagcaggtggcagcaggggaacgtcttctcatgctccgtgatgcatgaggctctgcacaaccactacacgcagaagagcctctccctgtctccgggtaaatgacgcggccgcgactctagagtgagggtccccacctgggacccttgagagtatcaggtctcccacgtgggagacaagaaatccctgtttaatatttaaacagcagtgttccccatctgggtccttgcacccctcactctggcctcagccgactgcacagcggcccctgcatccccttggctgtgaggcccctggacaagcagaggtggccagagctgggaggcatggccctggggtcccacgaatttgctggggaatctcgtttttcttcttaagacttttgggacatggtttgactcccgaacatcaccgacgtgtctcctgtttttctgggtggcctcgggacacctgccctgcccccacgagggtcaggactgtgactctttttagggccaggcaggtgcctggacatttgccttgctggacggggactggggatgtgggagggagcagacaggaggaatcatgtcaggcctgtgtgtgaaaggaagctccactgtcaccctccacctcttcaccccccactcaccagtgtcccctccactgtcacattgtaactgaacttcaggataataaagtgtttgcctccaaaaaaaaaaaaaaaaaaaaaaaaaaaaaaaaaaaaaaaaaaaaaaaaaaaaaaaaaaaaaaaaaaaaaaaaaaaaaaaccgaattcactggccgtcgttttacaacgtcgtgactgggaaaaccctggcgttacccaacttaatcgccttgcagcacatccccctttcgccagctggcgtaatagcgaagaggcccgcaccgatcgcccttcccaacagttgcgcagcctgaatggcgaatggcgcctgatgcggtattttctccttacgcatctgtgcggtatttcacaccgcatacgtcaaagcaaccatagtacgcgccctgtagcggcgcattaagcgcggcgggtgtggtggttacgcgcagcgtgaccgctacacttgccagcgccttagcgcccgctcctttcgctttcttcccttcctttctcgccacgttcgccggctttccccgtcaagctctaaatcgggggctccctttagggttccgatttagtgctttacggcacctcgaccccaaaaaacttgatttgggtgatggttcacgtagtgggccatcgccctgatagacggtttttcgccctttgacgttggagtccacgttctttaatagtggactcttgttccaaactggaacaacactcaactctatctcgggctattcttttgatttataagggattttgccgatttcggtctattggttaaaaaatgagctgatttaacaaaaatttaacgcgaattttaacaaaatattaacgtttacaattttatggtgcactctcagtacaatctgctctgatgccgcatagttaagccagccccgacacccgccaacacccgctgacgcgccctgacgggcttgtctgctcccggcatccgcttacagacaagctgtgaccgtctccgggagctgcatgtgtcagaggttttcaccgtcatcaccgaaacgcgcgagacgaaagggcctcgtgatacgcctatttttataggttaatgtcatgataataatggtttcttagacgtcaggtggcacttttcggggaaatgtgcgcggaacccctatttgtttatttttctaaatacattcaaatatgtatccgctcatgagacaataaccctgataaatgcttcaataatattgaaaaaggaagagtatgagtattcaacatttccgtgtcgcccttattcccttttttgcggcattttgccttcctgtttttgctcacccagaaacgctggtgaaagtaaaagatgctgaagatcagttgggtgcacgagtgggttacatcgaactggatctcaacagcggtaagatccttgagagttttcgccccgaagaacgttttccaatgatgagcacttttaaagttctgctatgtggcgcggtattatcccgtattgacgccgggcaagagcaactcggtcgccgcatacactattctcagaatgacttggttgagtactcaccagtcacagaaaagcatcttacggatggcatgacagtaagagaattatgcagtgctgccataaccatgagtgataacactgcggccaacttacttctgacaacgatcggaggaccgaaggagctaaccgcttttttgcacaacatgggggatcatgtaactcgccttgatcgttgggaaccggagctgaatgaagccataccaaacgacgagcgtgacaccacgatgcctgtagcaatggcaacaacgttgcgcaaactattaactggcgaactacttactctagcttcccggcaacaattaatagactggatggaggcggataaagttgcaggaccacttctgcgctcggcccttccggctggctggtttattgctgataaatctggagccggtgagcgtgggtctcgcggtatcattgcagcactggggccagatggtaagccctcccgtatcgtagttatctacacgacggggagtcaggcaactatggatgaacgaaatagacagatcgctgagataggtgcctcactgattaagcattggtaactgtcagaccaagtttactcatatatactttagattgatttaaaacttcatttttaatttaaaaggatctaggtgaagatcctttttgataatctcatgaccaaaatcccttaacgtgagttttcgttccactgagcgtcagaccccgtagaaaagatcaaaggatcttcttgagatcctttttttctgcgcgtaatctgctgcttgcaaacaaaaaaaccaccgctaccagcggtggtttgtttgccggatcaagagctaccaactctttttccgaaggtaactggcttcagcagagcgcagataccaaatactgttcttctagtgtagccgtagttaggccaccacttcaagaactctgtagcaccgcctacatacctcgctctgctaatcctgttaccagtggctgctgccagtggcgataagtcgtgtcttaccgggttggactcaagacgatagttaccggataaggcgcagcggtcgggctgaacggggggttcgtgcacacagcccagcttggagcgaacgacctacaccgaactgagatacctacagcgtgagctatgagaaagcgccacgcttcccgaagggagaaaggcggacaggtatccggtaagcggcagggtcggaacaggagagcgcacgagggagcttccagggggaaacgcctggtatctttatagtcctgtcgggtttcgccacctctgacttgagcgtcgatttttgtgatgctcgtcaggggggcggagcctatggaaaaacgccagcaacgcggcctttttacggttcctggccttttgctggccttttgctcacatgttctttcctgcgttatcccctgattctgtggataaccgtattaccgcctttgagtgagctgataccgctcgccgcagccgaacgaccgagcgcagcgagtcagtgagcgaggaagcggaagagcgcccaatacgcaaaccgcctctccccgcgcgttggccgattcattaatgcagctggcacgacaggtttcccgactggaaagcgggcagtgagcgcaacgcaattaatgtgagttagctcactcattaggcaccccaggctttacactttatgcttccggctcgtatgttgtgtggaattgtgagcggataacaatttcacacaggaaacagctatgaccatgattacgccaagcttaattccctccccagcaggcagaagtatgcaaagcatgcatctcaattagtcagcaaccatagtcccgcccctaactccgcccatcccgcccctaactccgcccagttccgcccattctccgccccatggctgactaattttttttatttatgcagaggccgaggccgcctcggcctctgagctattccagaagtagtgaggaggcttttttggaggcctaggcttttgcaaaaagctttgcaaagatggataaagttttaaacagagaggaatctttgcagctaatggaccttctaggtcttgaaaggagtgggaattggctccggtgcccgtcagtgggcagagcgcacatcgcccacagtccccgagaagttggggggaggggtcggcaattgaaccggtgcctagagaaggtggcgcggggtaaactgggaaagtgatgtcgtgtactggctccgcctttttcccgagggtgggggagaaccgtatataagtgcagtagtcgccgtgaacgttctttttcgcaacgggtttgccgccagaacacaggtaagtgccgtgtgtggttcccgcgggcctggcctctttacgggttatggcccttgcgtgccttgaattacttccacctggctgcagtacgtgattcttgatcccgagcttcgggttggaagtgggtgggagagttcgaggccttgcgcttaaggagccccttcgcctcgtgcttgagttgaggcctggcctgggcgctggggccgccgcgtgcgaatctggtggcaccttcgcgcctgtctcgctgctttcgataagtctctagccatttaaaatttttgatgacctgctgcgacgctttttttctggcaagatagtcttgtaaatgcgggccaagatctgcacactggtatttcggtttttggggccgcgggcggcgacggggcccgtgcgtcccagcgcacatgttcggcgaggcggggcctgcgagcgcggccaccgagaatcggacgggggtagtctcaagctggccggcctgctctggtgcctggcctcgcgccgccgtgtatcgccccgccctgggcggcaaggctggcccggtcggcaccagttgcgtgagcggaaagatggccgcttcccggccctgctgcagggagctcaaaatggaggacgcggcgctcgggagagcgggcgggtgagtcacccacacaaaggaaaagggcctttccgtcctcagccgtcgcttcatgtgactccacggagtaccgggcgccgtccaggcacctcgattagttctcgagcttttggagtacgtcgtctttaggttggggggaggggttttatgcgatggagtttccccacactgagtgggtggagactgaagttaggccagcttggcacttgatgtaattctccttggaatttgccctttttgagtttggatcttggttcattctcaagcctcagacagtggttcaaagtttttttcttccatt

SEQ ID NO: 849 - DNA, 7351 bp, Artificial Sequence
  Chemically synthesized sequence pBOS-hCg4
tcaggtgtcgtgaggaattctctagagatccctcgacctcgagatccattgtgcccgggcgccaccatggagtttgggctgagctggctttttcttgtcgcgattttaaaaggtgtccagtgcgcatggtatgccgaaagggatgctgaaattgagaacgaaaagctgcgccgggaggttgaagaactgcggcaggccagcgaggcagatctccagccaggaactattgagtacgaacgccatcgacttacgcgtgcgcaggccgacgcacaggaactgaagaatgccagagactccgctgaagtggtggaaaccgcattctgtactttcgtgctgtcgcggatcgcaggtgaaattgccagtattctcgacgggctccccctgtcggtgcagcggcgttttccggaactggaaaaccgacatgttgatttcctgaaacgggatatcatcaaagccatgaacaaagcagccgcgctggatgaactgataccggggttgctgagtgaatatatcgaacagtcaggttaacaggctgcggcattttgtccgcgccgggcttcgctcactgttcaggccggagccacagaccgccgttgaatgggcggatgctaattactatctcccgaaagaatccgcataccaggaagggcgctgggaaacactgccctttcagcgggccatcatgaatgcgatgggcagcgactacatccgtgaggtgaatgtggtgaagtctgcccgtgtcggttattccaaaatgctgctgggtgtttatgcctactttatagagcataagcagcgcaacacccttatctggttgccgacggatggtgatgccgagaactttatgaaaacccacgttgagccgactattcgtgatattccgtcgctgctggcgctggccccgtggtatggcaaaaagcaccgggataacacgctcaccatgaagcgtttcactaatgggcgtggcttctggtgcctgggcggtaaagcggcaaaaaactaccgtgaaaagtcggtggatgtggcgggttatgatgaacttgctgcttttgatgatgatattgaacaggaaggctctccgacgttcctgggtgacaagcgcgtcgaccaagggcccatccgtcttccccctggcgccctgctccaggagcacctccgagagcacagcggccctgggctgcctggtcaaggactacttccccgaaccggtgacggtgtcgtggaactcaggcgccctgaccagcggcgtgcacaccttcccggctgtcctacagtcctcaggactctactccctcagcagcgtggtgaccgtgccctccagcagcttgggcacgaagacctacacctgcaatgtagatcacaagcccagcaacaccaaggtggacaagagagttgagtccaaatacggtccgccatgcccatcatgcccagcacctgaattcctggggggaccatcagtcttcctgttccccccaaaacccaaggacaccctcatgatctcccggacccctgaggtcacgtgcgtggtggtggacgtgagccaggaagaccccgaggtccagttcaactggtacgtggatggcgtggaggtgcataatgccaagacaaagccgcgggaggagcagttcaacagcacgtaccgtgtggtcagcgtcctcaccgtcctgcaccaggactggctgaacggcaaggagtacaagtgcaaggtctccaacaaaggcctcccgtcctccatcgagaaaaccatctccaaagccaaagggcagccccgagagccacaggtgtacaccctgcccccatcccaggaggagatgaccaagaaccaggtcagcctgacctgcctggtcaaaggcttctaccccagcgacatcgccgtggagtgggagagcaatgggcagccggagaacaactacaagaccacgcctcccgtgctggactccgacggctccttcttcctctacagcaggctaaccgtggacaagagcaggtggcaggaggggaatgtcttctcatgctccgtgatgcatgaggctctgcacaaccactacacgcagaagagcctctccctgtctctgggtaaatgagcggccgcgactctagagtgagggtccccacctgggacccttgagagtatcaggtctcccacgtgggagacaagaaatccctgtttaatatttaaacagcagtgttccccatctgggtccttgcacccctcactctggcctcagccgactgcacagcggcccctgcatccccttggctgtgaggcccctggacaagcagaggtggccagagctgggaggcatggccctggggtcccacgaatttgctggggaatctcgtttttcttcttaagacttttgggacatggtttgactcccgaacatcaccgacgtgtctcctgtttttctgggtggcctcgggacacctgccctgcccccacgagggtcaggactgtgactctttttagggccaggcaggtgcctggacatttgccttgctggacggggactggggatgtgggagggagcagacaggaggaatcatgtcaggcctgtgtgtgaaaggaagctccactgtcaccctccacctcttcaccccccactcaccagtgtcccctccactgtcacattgtaactgaacttcaggataataaagtgtttgcctccaaaaaaaaaaaaaaaaaaaaaaaaaaaaaaaaaaaaaaaaaaaaaaaaaaaaaaaaaaaaaaaaaaaaaaaaaaaaaaaccgaattcactggccgtcgttttacaacgtcgtgactgggaaaaccctggcgttacccaacttaatcgccttgcagcacatccccctttcgccagctggcgtaatagcgaagaggcccgcaccgatcgcccttcccaacagttgcgcagcctgaatggcgaatggcgcctgatgcggtattttctccttacgcatctgtgcggtatttcacaccgcatacgtcaaagcaaccatagtacgcgccctgtagcggcgcattaagcgcggcgggtgtggtggttacgcgcagcgtgaccgctacacttgccagcgccttagcgcccgctcctttcgctttcttcccttcctttctcgccacgttcgccggctttccccgtcaagctctaaatcgggggctccctttagggttccgatttagtgctttacggcacctcgaccccaaaaaacttgatttgggtgatggttcacgtagtgggccatcgccctgatagacggtttttcgccctttgacgttggagtccacgttctttaatagtggactcttgttccaaactggaacaacactcaactctatctcgggctattcttttgatttataagggattttgccgatttcggtctattggttaaaaaatgagctgatttaacaaaaatttaacgcgaattttaacaaaatattaacgtttacaattttatggtgcactctcagtacaatctgctctgatgccgcatagttaagccagccccgacacccgccaacacccgctgacgcgccctgacgggcttgtctgctcccggcatccgcttacagacaagctgtgaccgtctccgggagctgcatgtgtcagaggttttcaccgtcatcaccgaaacgcgcgagacgaaagggcctcgtgatacgcctatttttataggttaatgtcatgataataatggtttcttagacgtcaggtggcacttttcggggaaatgtgcgcggaacccctatttgtttatttttctaaatacattcaaatatgtatccgctcatgagacaataaccctgataaatgcttcaataatattgaaaaaggaagagtatgagtattcaacatttccgtgtcgcccttattcccttttttgcggcattttgccttcctgtttttgctcacccagaaacgctggtgaaagtaaaagatgctgaagatcagttgggtgcacgagtgggttacatcgaactggatctcaacagcggtaagatccttgagagttttcgccccgaagaacgttttccaatgatgagcacttttaaagttctgctatgtggcgcggtattatcccgtattgacgccgggcaagagcaactcggtcgccgcatacactattctcagaatgacttggttgagtactcaccagtcacagaaaagcatcttacggatggcatgacagtaagagaattatgcagtgctgccataaccatgagtgataacactgcggccaacttacttctgacaacgatcggaggaccgaaggagctaaccgcttttttgcacaacatgggggatcatgtaactcgccttgatcgttgggaaccggagctgaatgaagccataccaaacgacgagcgtgacaccacgatgcctgtagcaatggcaacaacgttgcgcaaactattaactggcgaactacttactctagcttcccggcaacaattaatagactggatggaggcggataaagttgcaggaccacttctgcgctcggcccttccggctggctggtttattgctgataaatctggagccggtgagcgtgggtctcgcggtatcattgcagcactggggccagatggtaagccctcccgtatcgtagttatctacacgacggggagtcaggcaactatggatgaacgaaatagacagatcgctgagataggtgcctcactgattaagcattggtaactgtcagaccaagtttactcatatatactttagattgatttaaaacttcatttttaatttaaaaggatctaggtgaagatcctttttgataatctcatgaccaaaatcccttaacgtgagttttcgttccactgagcgtcagaccccgtagaaaagatcaaaggatcttcttgagatcctttttttctgcgcgtaatctgctgcttgcaaacaaaaaaaccaccgctaccagcggtggtttgtttgccggatcaagagctaccaactctttttccgaaggtaactggcttcagcagagcgcagataccaaatactgttcttctagtgtagccgtagttaggccaccacttcaagaactctgtagcaccgcctacatacctcgctctgctaatcctgttaccagtggctgctgccagtggcgataagtcgtgtcttaccgggttggactcaagacgatagttaccggataaggcgcagcggtcgggctgaacggggggttcgtgcacacagcccagcttggagcgaacgacctacaccgaactgagatacctacagcgtgagctatgagaaagcgccacgcttcccgaagggagaaaggcggacaggtatccggtaagcggcagggtcggaacaggagagcgcacgagggagcttccagggggaaacgcctggtatctttatagtcctgtcgggtttcgccacctctgacttgagcgtcgatttttgtgatgctcgtcaggggggcggagcctatggaaaaacgccagcaacgcggcctttttacggttcctggccttttgctggccttttgctcacatgttctttcctgcgttatcccctgattctgtggataaccgtattaccgcctttgagtgagctgataccgctcgccgcagccgaacgaccgagcgcagcgagtcagtgagcgaggaagcggaagagcgcccaatacgcaaaccgcctctccccgcgcgttggccgattcattaatgcagctggcacgacaggtttcccgactggaaagcgggcagtgagcgcaacgcaattaatgtgagttagctcactcattaggcaccccaggctttacactttatgcttccggctcgtatgttgtgtggaattgtgagcggataacaatttcacacaggaaacagctatgaccatgattacgccaagcttaattccctccccagcaggcagaagtatgcaaagcatgcatctcaattagtcagcaaccatagtcccgcccctaactccgcccatcccgcccctaactccgcccagttccgcccattctccgccccatggctgactaattttttttatttatgcagaggccgaggccgcctcggcctctgagctattccagaagtagtgaggaggcttttttggaggcctaggcttttgcaaaaagctttgcaaagatggataaagttttaaacagagaggaatctttgcagctaatggaccttctaggtcttgaaaggagtgggaattggctccggtgcccgtcagtgggcagagcgcacatcgcccacagtccccgagaagttggggggaggggtcggcaattgaaccggtgcctagagaaggtggcgcggggtaaactgggaaagtgatgtcgtgtactggctccgcctttttcccgagggtgggggagaaccgtatataagtgcagtagtcgccgtgaacgttctttttcgcaacgggtttgccgccagaacacaggtaagtgccgtgtgtggttcccgcgggcctggcctctttacgggttatggcccttgcgtgccttgaattacttccacctggctgcagtacgtgattcttgatcccgagcttcgggttggaagtgggtgggagagttcgaggccttgcgcttaaggagccccttcgcctcgtgcttgagttgaggcctggcctgggcgctggggccgccgcgtgcgaatctggtggcaccttcgcgcctgtctcgctgctttcgataagtctctagccatttaaaatttttgatgacctgctgcgacgctttttttctggcaagatagtcttgtaaatgcgggccaagatctgcacactggtatttcggtttttggggccgcgggcggcgacggggcccgtgcgtcccagcgcacatgttcggcgaggcggggcctgcgagcgcggccaccgagaatcggacgggggtagtctcaagctggccggcctgctctggtgcctggcctcgcgccgccgtgtatcgccccgccctgggcggcaaggctggcccggtcggcaccagttgcgtgagcggaaagatggccgcttcccggccctgctgcagggagctcaaaatggaggacgcggcgctcgggagagcgggcgggtgagtcacccacacaaaggaaaagggcctttccgtcctcagccgtcgcttcatgtgactccacggagtaccgggcgccgtccaggcacctcgattagttctcgagcttttggagtacgtcgtctttaggttggggggaggggttttatgcgatggagtttccccacactgagtgggtggagactgaagttaggccagcttggcacttgatgtaattctccttggaatttgccctttttgagtttggatcttggttcattctcaagcctcagacagtggttcaaagtttttttcttccatt

SEQ ID NO: 850 - DNA, 6701 bp, Artificial Sequence
  Chemically synthesized sequence pBOS-hCk
tcaggtgtcgtgaggaattctctagagatccctcgacctcgagatccattgtgcccgggcgcaccatggacatgcgcgtgcccgcccagctgctgggcctgctgctgctgtggttccccggctcgcgatgcgcatggtatgccgaaagggatgctgaaattgagaacgaaaagctgcgccgggaggttgaagaactgcggcaggccagcgaggcagatctccagccaggaactattgagtacgaacgccatcgacttacgcgtgcgcaggccgacgcacaggaactgaagaatgccagagactccgctgaagtggtggaaaccgcattctgtactttcgtgctgtcgcggatcgcaggtgaaattgccagtattctcgacgggctccccctgtcggtgcagcggcgttttccggaactggaaaaccgacatgttgatttcctgaaacgggatatcatcaaagccatgaacaaagcagccgcgctggatgaactgataccggggttgctgagtgaatatatcgaacagtcaggttaacaggctgcggcattttgtccgcgccgggcttcgctcactgttcaggccggagccacagaccgccgttgaatgggcggatgctaattactatctcccgaaagaatccgcataccaggaagggcgctgggaaacactgccctttcagcgggccatcatgaatgcgatgggcagcgactacatccgtgaggtgaatgtggtgaagtctgcccgtgtcggttattccaaaatgctgctgggtgtttatgcctactttatagagcataagcagcgcaacacccttatctggttgccgacggatggtgatgccgagaactttatgaaaacccacgttgagccgactattcgtgatattccgtcgctgctggcgctggccccgtggtatggcaaaaagcaccgggataacacgctcaccatgaagcgtttcactaatgggcgtggcttctggtgcctgggcggtaaagcggcaaaaaactaccgtgaaaagtcggtggatgtggcgggttatgatgaacttgctgcttttgatgatgatattgaacaggaaggctctccgacgttcctgggtgacaagctacgtacggtggctgcaccatctgtcttcatcttcccgccatctgatgagcagttgaaatctggaactgcctctgttgtgtgcctgctgaataacttctatcccagagaggccaaagtacagtggaaggtggataacgccctccaatcgggtaactcccaggagagtgtcacagagcaggacagcaaggacagcacctacagcctcagcagcaccctgacgctgagcaaagcagactacgagaaacacaaagtctacgcctgcgaagtcacccatcagggcctgagctcgcccgtcacaaagagcttcaacaggggagagtgttgagcggccgcgactctagagtgagggtccccacctgggacccttgagagtatcaggtctcccacgtgggagacaagaaatccctgtttaatatttaaacagcagtgttccccatctgggtccttgcacccctcactctggcctcagccgactgcacagcggcccctgcatccccttggctgtgaggcccctggacaagcagaggtggccagagctgggaggcatggccctggggtcccacgaatttgctggggaatctcgtttttcttcttaagacttttgggacatggtttgactcccgaacatcaccgacgtgtctcctgtttttctgggtggcctcgggacacctgccctgcccccacgagggtcaggactgtgactctttttagggccaggcaggtgcctggacatttgccttgctggacggggactggggatgtgggagggagcagacaggaggaatcatgtcaggcctgtgtgtgaaaggaagctccactgtcaccctccacctcttcaccccccactcaccagtgtcccctccactgtcacattgtaactgaacttcaggataataaagtgtttgcctccaaaaaaaaaaaaaaaaaaaaaaaaaaaaaaaaaaaaaaaaaaaaaaaaaaaaaaaaaaaaaaaaaaaaaaaaaaaaaaaccgaattcactggccgtcgttttacaacgtcgtgactgggaaaaccctggcgttacccaacttaatcgccttgcagcacatccccctttcgccagctggcgtaatagcgaagaggcccgcaccgatcgcccttcccaacagttgcgcagcctgaatggcgaatggcgcctgatgcggtattttctccttacgcatctgtgcggtatttcacaccgcatacgtcaaagcaaccatagtacgcgccctgtagcggcgcattaagcgcggcgggtgtggtggttacgcgcagcgtgaccgctacacttgccagcgccttagcgcccgctcctttcgctttcttcccttcctttctcgccacgttcgccggctttccccgtcaagctctaaatcgggggctccctttagggttccgatttagtgctttacggcacctcgaccccaaaaaacttgatttgggtgatggttcacgtagtgggccatcgccctgatagacggtttttcgccctttgacgttggagtccacgttctttaatagtggactcttgttccaaactggaacaacactcaactctatctcgggctattcttttgatttataagggattttgccgatttcggtctattggttaaaaaatgagctgatttaacaaaaatttaacgcgaattttaacaaaatattaacgtttacaattttatggtgcactctcagtacaatctgctctgatgccgcatagttaagccagccccgacacccgccaacacccgctgacgcgccctgacgggcttgtctgctcccggcatccgcttacagacaagctgtgaccgtctccgggagctgcatgtgtcagaggttttcaccgtcatcaccgaaacgcgcgagacgaaagggcctcgtgatacgcctatttttataggttaatgtcatgataataatggtttcttagacgtcaggtggcacttttcggggaaatgtgcgcggaacccctatttgtttatttttctaaatacattcaaatatgtatccgctcatgagacaataaccctgataaatgcttcaataatattgaaaaaggaagagtatgagtattcaacatttccgtgtcgcccttattcccttttttgcggcattttgccttcctgtttttgctcacccagaaacgctggtgaaagtaaaagatgctgaagatcagttgggtgcacgagtgggttacatcgaactggatctcaacagcggtaagatccttgagagttttcgccccgaagaacgttttccaatgatgagcacttttaaagttctgctatgtggcgcggtattatcccgtattgacgccgggcaagagcaactcggtcgccgcatacactattctcagaatgacttggttgagtactcaccagtcacagaaaagcatcttacggatggcatgacagtaagagaattatgcagtgctgccataaccatgagtgataacactgcggccaacttacttctgacaacgatcggaggaccgaaggagctaaccgcttttttgcacaacatgggggatcatgtaactcgccttgatcgttgggaaccggagctgaatgaagccataccaaacgacgagcgtgacaccacgatgcctgtagcaatggcaacaacgttgcgcaaactattaactggcgaactacttactctagcttcccggcaacaattaatagactggatggaggcggataaagttgcaggaccacttctgcgctcggcccttccggctggctggtttattgctgataaatctggagccggtgagcgtgggtctcgcggtatcattgcagcactggggccagatggtaagccctcccgtatcgtagttatctacacgacggggagtcaggcaactatggatgaacgaaatagacagatcgctgagataggtgcctcactgattaagcattggtaactgtcagaccaagtttactcatatatactttagattgatttaaaacttcatttttaatttaaaaggatctaggtgaagatcctttttgataatctcatgaccaaaatcccttaacgtgagttttcgttccactgagcgtcagaccccgtagaaaagatcaaaggatcttcttgagatcctttttttctgcgcgtaatctgctgcttgcaaacaaaaaaaccaccgctaccagcggtggtttgtttgccggatcaagagctaccaactctttttccgaaggtaactggcttcagcagagcgcagataccaaatactgttcttctagtgtagccgtagttaggccaccacttcaagaactctgtagcaccgcctacatacctcgctctgctaatcctgttaccagtggctgctgccagtggcgataagtcgtgtcttaccgggttggactcaagacgatagttaccggataaggcgcagcggtcgggctgaacggggggttcgtgcacacagcccagcttggagcgaacgacctacaccgaactgagatacctacagcgtgagctatgagaaagcgccacgcttcccgaagggagaaaggcggacaggtatccggtaagcggcagggtcggaacaggagagcgcacgagggagcttccagggggaaacgcctggtatctttatagtcctgtcgggtttcgccacctctgacttgagcgtcgatttttgtgatgctcgtcaggggggcggagcctatggaaaaacgccagcaacgcggcctttttacggttcctggccttttgctggccttttgctcacatgttctttcctgcgttatcccctgattctgtggataaccgtattaccgcctttgagtgagctgataccgctcgccgcagccgaacgaccgagcgcagcgagtcagtgagcgaggaagcggaagagcgcccaatacgcaaaccgcctctccccgcgcgttggccgattcattaatgcagctggcacgacaggtttcccgactggaaagcgggcagtgagcgcaacgcaattaatgtgagttagctcactcattaggcaccccaggctttacactttatgcttccggctcgtatgttgtgtggaattgtgagcggataacaatttcacacaggaaacagctatgaccatgattacgccaagcttaattccctccccagcaggcagaagtatgcaaagcatgcatctcaattagtcagcaaccatagtcccgcccctaactccgcccatcccgcccctaactccgcccagttccgcccattctccgccccatggctgactaattttttttatttatgcagaggccgaggccgcctcggcctctgagctattccagaagtagtgaggaggcttttttggaggcctaggcttttgcaaaaagctttgcaaagatggataaagttttaaacagagaggaatctttgcagctaatggaccttctaggtcttgaaaggagtgggaattggctccggtgcccgtcagtgggcagagcgcacatcgcccacagtccccgagaagttggggggaggggtcggcaattgaaccggtgcctagagaaggtggcgcggggtaaactgggaaagtgatgtcgtgtactggctccgcctttttcccgagggtgggggagaaccgtatataagtgcagtagtcgccgtgaacgttctttttcgcaacgggtttgccgccagaacacaggtaagtgccgtgtgtggttcccgcgggcctggcctctttacgggttatggcccttgcgtgccttgaattacttccacctggctgcagtacgtgattcttgatcccgagcttcgggttggaagtgggtgggagagttcgaggccttgcgcttaaggagccccttcgcctcgtgcttgagttgaggcctggcctgggcgctggggccgccgcgtgcgaatctggtggcaccttcgcgcctgtctcgctgctttcgataagtctctagccatttaaaatttttgatgacctgctgcgacgctttttttctggcaagatagtcttgtaaatgcgggccaagatctgcacactggtatttcggtttttggggccgcgggcggcgacggggcccgtgcgtcccagcgcacatgttcggcgaggcggggcctgcgagcgcggccaccgagaatcggacgggggtagtctcaagctggccggcctgctctggtgcctggcctcgcgccgccgtgtatcgccccgccctgggcggcaaggctggcccggtcggcaccagttgcgtgagcggaaagatggccgcttcccggccctgctgcagggagctcaaaatggaggacgcggcgctcgggagagcgggcgggtgagtcacccacacaaaggaaaagggcctttccgtcctcagccgtcgcttcatgtgactccacggagtaccgggcgccgtccaggcacctcgattagttctcgagcttttggagtacgtcgtctttaggttggggggaggggttttatgcgatggagtttccccacactgagtgggtggagactgaagttaggccagcttggcacttgatgtaattctccttggaatttgccctttttgagtttggatcttggttcattctcaagcctcagacagtggttcaaagtttttttcttccatt

SEQ ID NO: 851 - DNA, 6679 bp, Artificial Sequence
  Chemically synthesized sequence pBOS-hCl
tcaggtgtcgtgaggaattctctagagatccctcgacctcgagatccattgtgcccgggcgccaccatgacttggaccccactcctcttcctcaccctcctcctccactgcacaggaagcttatcgcgaaagggatgctgaaattgagaacgaaaagctgcgccgggaggttgaagaactgcggcaggccagcgaggcagatctccagccaggaactattgagtacgaacgccatcgacttacgcgtgcgcaggccgacgcacaggaactgaagaatgccagagactccgctgaagtggtggaaaccgcattctgtactttcgtgctgtcgcggatcgcaggtgaaattgccagtattctcgacgggctccccctgtcggtgcagcggcgttttccggaactggaaaaccgacatgttgatttcctgaaacgggatatcatcaaagccatgaacaaagcagccgcgctggatgaactgataccggggttgctgagtgaatatatcgaacagtcaggttaacaggctgcggcattttgtccgcgccgggcttcgctcactgttcaggccggagccacagaccgccgttgaatgggcggatgctaattactatctcccgaaagaatccgcataccaggaagggcgctgggaaacactgccctttcagcgggccatcatgaatgcgatgggcagcgactacatccgtgaggtgaatgtggtgaagtctgcccgtgtcggttattccaaaatgctgctgggtgtttatgcctactttatagagcataagcagcgcaacacccttatctggttgccgacggatggtgatgccgagaactttatgaaaacccacgttgagccgactattcgtgatattccgtcgctgctggcgctggccccgtggtatggcaaaaagcaccgggataacacgctcaccatgaagcgtttcactaatgggcgtggcttctggtgcctgggcggtaaagcggcaaaaaactaccgtgaaaagtcggtggatgtggcgggttatgatgaacttgctgcttttgatgatgatattgaacaggaaggctctccgacgttcctgggtgacaagcgttaacccaaggctgccccctcggtcactctgttcccgccctcctctgaggagcttcaagccaacaaggccacactggtgtgtctcataagtgacttctacccgggagccgtgacagtggcctggaaggcagatagcagccccgtcaaggcgggagtggagaccaccacaccctccaaacaaagcaacaacaagtacgcggccagcagctacctgagcctgacgcctgagcagtggaagtcccacagaagctacagctgccaggtcacgcatgaagggagcaccgtggagaagacagtggcccctacagaatgttcatgagcggccgcgactctagagtgagggtccccacctgggacccttgagagtatcaggtctcccacgtgggagacaagaaatccctgtttaatatttaaacagcagtgttccccatctgggtccttgcacccctcactctggcctcagccgactgcacagcggcccctgcatccccttggctgtgaggcccctggacaagcagaggtggccagagctgggaggcatggccctggggtcccacgaatttgctggggaatctcgtttttcttcttaagacttttgggacatggtttgactcccgaacatcaccgacgtgtctcctgtttttctgggtggcctcgggacacctgccctgcccccacgagggtcaggactgtgactctttttagggccaggcaggtgcctggacatttgccttgctggacggggactggggatgtgggagggagcagacaggaggaatcatgtcaggcctgtgtgtgaaaggaagctccactgtcaccctccacctcttcaccccccactcaccagtgtcccctccactgtcacattgtaactgaacttcaggataataaagtgtttgcctccaaaaaaaaaaaaaaaaaaaaaaaaaaaaaaaaaaaaaaaaaaaaaaaaaaaaaaaaaaaaaaaaaaaaaaaaaaaaaaaccgaattcactggccgtcgttttacaacgtcgtgactgggaaaaccctggcgttacccaacttaatcgccttgcagcacatccccctttcgccagctggcgtaatagcgaagaggcccgcaccgatcgcccttcccaacagttgcgcagcctgaatggcgaatggcgcctgatgcggtattttctccttacgcatctgtgcggtatttcacaccgcatacgtcaaagcaaccatagtacgcgccctgtagcggcgcattaagcgcggcgggtgtggtggttacgcgcagcgtgaccgctacacttgccagcgccttagcgcccgctcctttcgctttcttcccttcctttctcgccacgttcgccggctttccccgtcaagctctaaatcgggggctccctttagggttccgatttagtgctttacggcacctcgaccccaaaaaacttgatttgggtgatggttcacgtagtgggccatcgccctgatagacggtttttcgccctttgacgttggagtccacgttctttaatagtggactcttgttccaaactggaacaacactcaactctatctcgggctattcttttgatttataagggattttgccgatttcggtctattggttaaaaaatgagctgatttaacaaaaatttaacgcgaattttaacaaaatattaacgtttacaattttatggtgcactctcagtacaatctgctctgatgccgcatagttaagccagccccgacacccgccaacacccgctgacgcgccctgacgggcttgtctgctcccggcatccgcttacagacaagctgtgaccgtctccgggagctgcatgtgtcagaggttttcaccgtcatcaccgaaacgcgcgagacgaaagggcctcgtgatacgcctatttttataggttaatgtcatgataataatggtttcttagacgtcaggtggcacttttcggggaaatgtgcgcggaacccctatttgtttatttttctaaatacattcaaatatgtatccgctcatgagacaataaccctgataaatgcttcaataatattgaaaaaggaagagtatgagtattcaacatttccgtgtcgcccttattcccttttttgcggcattttgccttcctgtttttgctcacccagaaacgctggtgaaagtaaaagatgctgaagatcagttgggtgcacgagtgggttacatcgaactggatctcaacagcggtaagatccttgagagttttcgccccgaagaacgttttccaatgatgagcacttttaaagttctgctatgtggcgcggtattatcccgtattgacgccgggcaagagcaactcggtcgccgcatacactattctcagaatgacttggttgagtactcaccagtcacagaaaagcatcttacggatggcatgacagtaagagaattatgcagtgctgccataaccatgagtgataacactgcggccaacttacttctgacaacgatcggaggaccgaaggagctaaccgcttttttgcacaacatgggggatcatgtaactcgccttgatcgttgggaaccggagctgaatgaagccataccaaacgacgagcgtgacaccacgatgcctgtagcaatggcaacaacgttgcgcaaactattaactggcgaactacttactctagcttcccggcaacaattaatagactggatggaggcggataaagttgcaggaccacttctgcgctcggcccttccggctggctggtttattgctgataaatctggagccggtgagcgtgggtctcgcggtatcattgcagcactggggccagatggtaagccctcccgtatcgtagttatctacacgacggggagtcaggcaactatggatgaacgaaatagacagatcgctgagataggtgcctcactgattaagcattggtaactgtcagaccaagtttactcatatatactttagattgatttaaaacttcatttttaatttaaaaggatctaggtgaagatcctttttgataatctcatgaccaaaatcccttaacgtgagttttcgttccactgagcgtcagaccccgtagaaaagatcaaaggatcttcttgagatcctttttttctgcgcgtaatctgctgcttgcaaacaaaaaaaccaccgctaccagcggtggtttgtttgccggatcaagagctaccaactctttttccgaaggtaactggcttcagcagagcgcagataccaaatactgttcttctagtgtagccgtagttaggccaccacttcaagaactctgtagcaccgcctacatacctcgctctgctaatcctgttaccagtggctgctgccagtggcgataagtcgtgtcttaccgggttggactcaagacgatagttaccggataaggcgcagcggtcgggctgaacggggggttcgtgcacacagcccagcttggagcgaacgacctacaccgaactgagatacctacagcgtgagctatgagaaagcgccacgcttcccgaagggagaaaggcggacaggtatccggtaagcggcagggtcggaacaggagagcgcacgagggagcttccagggggaaacgcctggtatctttatagtcctgtcgggtttcgccacctctgacttgagcgtcgatttttgtgatgctcgtcaggggggcggagcctatggaaaaacgccagcaacgcggcctttttacggttcctggccttttgctggccttttgctcacatgttctttcctgcgttatcccctgattctgtggataaccgtattaccgcctttgagtgagctgataccgctcgccgcagccgaacgaccgagcgcagcgagtcagtgagcgaggaagcggaagagcgcccaatacgcaaaccgcctctccccgcgcgttggccgattcattaatgcagctggcacgacaggtttcccgactggaaagcgggcagtgagcgcaacgcaattaatgtgagttagctcactcattaggcaccccaggctttacactttatgcttccggctcgtatgttgtgtggaattgtgagcggataacaatttcacacaggaaacagctatgaccatgattacgccaagcttaattccctccccagcaggcagaagtatgcaaagcatgcatctcaattagtcagcaaccatagtcccgcccctaactccgcccatcccgcccctaactccgcccagttccgcccattctccgccccatggctgactaattttttttatttatgcagaggccgaggccgcctcggcctctgagctattccagaagtagtgaggaggcttttttggaggcctaggcttttgcaaaaagctttgcaaagatggataaagttttaaacagagaggaatctttgcagctaatggaccttctaggtcttgaaaggagtgggaattggctccggtgcccgtcagtgggcagagcgcacatcgcccacagtccccgagaagttggggggaggggtcggcaattgaaccggtgcctagagaaggtggcgcggggtaaactgggaaagtgatgtcgtgtactggctccgcctttttcccgagggtgggggagaaccgtatataagtgcagtagtcgccgtgaacgttctttttcgcaacgggtttgccgccagaacacaggtaagtgccgtgtgtggttcccgcgggcctggcctctttacgggttatggcccttgcgtgccttgaattacttccacctggctgcagtacgtgattcttgatcccgagcttcgggttggaagtgggtgggagagttcgaggccttgcgcttaaggagccccttcgcctcgtgcttgagttgaggcctggcctgggcgctggggccgccgcgtgcgaatctggtggcaccttcgcgcctgtctcgctgctttcgataagtctctagccatttaaaatttttgatgacctgctgcgacgctttttttctggcaagatagtcttgtaaatgcgggccaagatctgcacactggtatttcggtttttggggccgcgggcggcgacggggcccgtgcgtcccagcgcacatgttcggcgaggcggggcctgcgagcgcggccaccgagaatcggacgggggtagtctcaagctggccggcctgctctggtgcctggcctcgcgccgccgtgtatcgccccgccctgggcggcaaggctggcccggtcggcaccagttgcgtgagcggaaagatggccgcttcccggccctgctgcagggagctcaaaatggaggacgcggcgctcgggagagcgggcgggtgagtcacccacacaaaggaaaagggcctttccgtcctcagccgtcgcttcatgtgactccacggagtaccgggcgccgtccaggcacctcgattagttctcgagcttttggagtacgtcgtctttaggttggggggaggggttttatgcgatggagtttccccacactgagtgggtggagactgaagttaggccagcttggcacttgatgtaattctccttggaatttgccctttttgagtttggatcttggttcattctcaagcctcagacagtggttcaaagtttttttcttccatt

SEQ ID NO: 852 - DNA, 7342 bp, Artificial Sequence
  Chemically synthesized sequence pBOS-mCg1
tcaggtgtcgtgaggaattctctagagatccctcgacctcgagatccattgtgcccgggcgccaccatggagtttgggctgagctggctttttcttgtcgcgattttaaaaggtgtccagtgcgcatggtatgccgaaagggatgctgaaattgagaacgaaaagctgcgccgggaggttgaagaactgcggcaggccagcgaggcagatctccagccaggaactattgagtacgaacgccatcgacttacgcgtgcgcaggccgacgcacaggaactgaagaatgccagagactccgctgaagtggtggaaaccgcattctgtactttcgtgctgtcgcggatcgcaggtgaaattgccagtattctcgacgggctccccctgtcggtgcagcggcgttttccggaactggaaaaccgacatgttgatttcctgaaacgggatatcatcaaagccatgaacaaagcagccgcgctggatgaactgataccggggttgctgagtgaatatatcgaacagtcaggttaacaggctgcggcattttgtccgcgccgggcttcgctcactgttcaggccggagccacagaccgccgttgaatgggcggatgctaattactatctcccgaaagaatccgcataccaggaagggcgctgggaaacactgccctttcagcgggccatcatgaatgcgatgggcagcgactacatccgtgaggtgaatgtggtgaagtctgcccgtgtcggttattccaaaatgctgctgggtgtttatgcctactttatagagcataagcagcgcaacacccttatctggttgccgacggatggtgatgccgagaactttatgaaaacccacgttgagccgactattcgtgatattccgtcgctgctggcgctggccccgtggtatggcaaaaagcaccgggataacacgctcaccatgaagcgtttcactaatgggcgtggcttctggtgcctgggcggtaaagcggcaaaaaactaccgtgaaaagtcggtggatgtggcgggttatgatgaacttgctgcttttgatgatgatattgaacaggaaggctctccgacgttcctgggtgacaagcgctaaaacgacacccccatctgtctatccactggcccctggatctgctgcccaaactaactccatggtgaccctgggatgcctggtcaagggctatttccctgagccagtgacagtgacctggaactctggatccctgtccagcggtgtgcacaccttcccagctgtcctgcagtctgacctctacactctgagcagctcagtgactgtcccctccagcacctggcccagcgagaccgtcacctgcaacgttgcccacccggccagcagcaccaaggtggacaagaaaattgtgcccagggattgtggttgtaagccttgcatatgtacagtcccagaagtatcatctgtcttcatcttccccccaaagcccaaggatgtgctcaccattactctgactcctaaggtcacgtgtgttgtggtagacatcagcaaggatgatcccgaggtccagttcagctggtttgtagatgatgtggaggtgcacacagctcagacgcaaccccgggaggagcagttcaacagcactttccgctcagtcagtgaacttcccatcatgcaccaggactggctcaatggcaaggagttcaaatgcagggtcaacagtgcagctttccctgcccccatcgagaaaaccatctccaaaaccaaaggcagaccgaaggctccacaggtgtacaccattccacctcccaaggagcagatggccaaggataaagtcagtctgacctgcatgataacagacttcttccctgaagacattactgtggagtggcagtggaatgggcagccagcggagaactacaagaacactcagcccatcatggacacagatggctcttacttcgtctacagcaagctcaatgtgcagaagagcaactgggaggcaggaaatactttcacctgctctgtgttacatgagggcctgcacaaccaccatactgagaagagcctctcccactctcctggtaaataagcggccgcgactctagagtgagggtccccacctgggacccttgagagtatcaggtctcccacgtgggagacaagaaatccctgtttaatatttaaacagcagtgttccccatctgggtccttgcacccctcactctggcctcagccgactgcacagcggcccctgcatccccttggctgtgaggcccctggacaagcagaggtggccagagctgggaggcatggccctggggtcccacgaatttgctggggaatctcgtttttcttcttaagacttttgggacatggtttgactcccgaacatcaccgacgtgtctcctgtttttctgggtggcctcgggacacctgccctgcccccacgagggtcaggactgtgactctttttagggccaggcaggtgcctggacatttgccttgctggacggggactggggatgtgggagggagcagacaggaggaatcatgtcaggcctgtgtgtgaaaggaagctccactgtcaccctccacctcttcaccccccactcaccagtgtcccctccactgtcacattgtaactgaacttcaggataataaagtgtttgcctccaaaaaaaaaaaaaaaaaaaaaaaaaaaaaaaaaaaaaaaaaaaaaaaaaaaaaaaaaaaaaaaaaaaaaaaaaaaaaaaccgaattcactggccgtcgttttacaacgtcgtgactgggaaaaccctggcgttacccaacttaatcgccttgcagcacatccccctttcgccagctggcgtaatagcgaagaggcccgcaccgatcgcccttcccaacagttgcgcagcctgaatggcgaatggcgcctgatgcggtattttctccttacgcatctgtgcggtatttcacaccgcatacgtcaaagcaaccatagtacgcgccctgtagcggcgcattaagcgcggcgggtgtggtggttacgcgcagcgtgaccgctacacttgccagcgccttagcgcccgctcctttcgctttcttcccttcctttctcgccacgttcgccggctttccccgtcaagctctaaatcgggggctccctttagggttccgatttagtgctttacggcacctcgaccccaaaaaacttgatttgggtgatggttcacgtagtgggccatcgccctgatagacggtttttcgccctttgacgttggagtccacgttctttaatagtggactcttgttccaaactggaacaacactcaactctatctcgggctattcttttgatttataagggattttgccgatttcggtctattggttaaaaaatgagctgatttaacaaaaatttaacgcgaattttaacaaaatattaacgtttacaattttatggtgcactctcagtacaatctgctctgatgccgcatagttaagccagccccgacacccgccaacacccgctgacgcgccctgacgggcttgtctgctcccggcatccgcttacagacaagctgtgaccgtctccgggagctgcatgtgtcagaggttttcaccgtcatcaccgaaacgcgcgagacgaaagggcctcgtgatacgcctatttttataggttaatgtcatgataataatggtttcttagacgtcaggtggcacttttcggggaaatgtgcgcggaacccctatttgtttatttttctaaatacattcaaatatgtatccgctcatgagacaataaccctgataaatgcttcaataatattgaaaaaggaagagtatgagtattcaacatttccgtgtcgcccttattcccttttttgcggcattttgccttcctgtttttgctcacccagaaacgctggtgaaagtaaaagatgctgaagatcagttgggtgcacgagtgggttacatcgaactggatctcaacagcggtaagatccttgagagttttcgccccgaagaacgttttccaatgatgagcacttttaaagttctgctatgtggcgcggtattatcccgtattgacgccgggcaagagcaactcggtcgccgcatacactattctcagaatgacttggttgagtactcaccagtcacagaaaagcatcttacggatggcatgacagtaagagaattatgcagtgctgccataaccatgagtgataacactgcggccaacttacttctgacaacgatcggaggaccgaaggagctaaccgcttttttgcacaacatgggggatcatgtaactcgccttgatcgttgggaaccggagctgaatgaagccataccaaacgacgagcgtgacaccacgatgcctgtagcaatggcaacaacgttgcgcaaactattaactggcgaactacttactctagcttcccggcaacaattaatagactggatggaggcggataaagttgcaggaccacttctgcgctcggcccttccggctggctggtttattgctgataaatctggagccggtgagcgtgggtctcgcggtatcattgcagcactggggccagatggtaagccctcccgtatcgtagttatctacacgacggggagtcaggcaactatggatgaacgaaatagacagatcgctgagataggtgcctcactgattaagcattggtaactgtcagaccaagtttactcatatatactttagattgatttaaaacttcatttttaatttaaaaggatctaggtgaagatcctttttgataatctcatgaccaaaatcccttaacgtgagttttcgttccactgagcgtcagaccccgtagaaaagatcaaaggatcttcttgagatcctttttttctgcgcgtaatctgctgcttgcaaacaaaaaaaccaccgctaccagcggtggtttgtttgccggatcaagagctaccaactctttttccgaaggtaactggcttcagcagagcgcagataccaaatactgttcttctagtgtagccgtagttaggccaccacttcaagaactctgtagcaccgcctacatacctcgctctgctaatcctgttaccagtggctgctgccagtggcgataagtcgtgtcttaccgggttggactcaagacgatagttaccggataaggcgcagcggtcgggctgaacggggggttcgtgcacacagcccagcttggagcgaacgacctacaccgaactgagatacctacagcgtgagctatgagaaagcgccacgcttcccgaagggagaaaggcggacaggtatccggtaagcggcagggtcggaacaggagagcgcacgagggagcttccagggggaaacgcctggtatctttatagtcctgtcgggtttcgccacctctgacttgagcgtcgatttttgtgatgctcgtcaggggggcggagcctatggaaaaacgccagcaacgcggcctttttacggttcctggccttttgctggccttttgctcacatgttctttcctgcgttatcccctgattctgtggataaccgtattaccgcctttgagtgagctgataccgctcgccgcagccgaacgaccgagcgcagcgagtcagtgagcgaggaagcggaagagcgcccaatacgcaaaccgcctctccccgcgcgttggccgattcattaatgcagctggcacgacaggtttcccgactggaaagcgggcagtgagcgcaacgcaattaatgtgagttagctcactcattaggcaccccaggctttacactttatgcttccggctcgtatgttgtgtggaattgtgagcggataacaatttcacacaggaaacagctatgaccatgattacgccaagcttaattccctccccagcaggcagaagtatgcaaagcatgcatctcaattagtcagcaaccatagtcccgcccctaactccgcccatcccgcccctaactccgcccagttccgcccattctccgccccatggctgactaattttttttatttatgcagaggccgaggccgcctcggcctctgagctattccagaagtagtgaggaggcttttttggaggcctaggcttttgcaaaaagctttgcaaagatggataaagttttaaacagagaggaatctttgcagctaatggaccttctaggtcttgaaaggagtgggaattggctccggtgcccgtcagtgggcagagcgcacatcgcccacagtccccgagaagttggggggaggggtcggcaattgaaccggtgcctagagaaggtggcgcggggtaaactgggaaagtgatgtcgtgtactggctccgcctttttcccgagggtgggggagaaccgtatataagtgcagtagtcgccgtgaacgttctttttcgcaacgggtttgccgccagaacacaggtaagtgccgtgtgtggttcccgcgggcctggcctctttacgggttatggcccttgcgtgccttgaattacttccacctggctgcagtacgtgattcttgatcccgagcttcgggttggaagtgggtgggagagttcgaggccttgcgcttaaggagccccttcgcctcgtgcttgagttgaggcctggcctgggcgctggggccgccgcgtgcgaatctggtggcaccttcgcgcctgtctcgctgctttcgataagtctctagccatttaaaatttttgatgacctgctgcgacgctttttttctggcaagatagtcttgtaaatgcgggccaagatctgcacactggtatttcggtttttggggccgcgggcggcgacggggcccgtgcgtcccagcgcacatgttcggcgaggcggggcctgcgagcgcggccaccgagaatcggacgggggtagtctcaagctggccggcctgctctggtgcctggcctcgcgccgccgtgtatcgccccgccctgggcggcaaggctggcccggtcggcaccagttgcgtgagcggaaagatggccgcttcccggccctgctgcagggagctcaaaatggaggacgcggcgctcgggagagcgggcgggtgagtcacccacacaaaggaaaagggcctttccgtcctcagccgtcgcttcatgtgactccacggagtaccgggcgccgtccaggcacctcgattagttctcgagcttttggagtacgtcgtctttaggttggggggaggggttttatgcgatggagtttccccacactgagtgggtggagactgaagttaggccagcttggcacttgatgtaattctccttggaatttgccctttttgagtttggatcttggttcattctcaagcctcagacagtggttcaaagtttttttcttccatt

SEQ ID NO: 853 - DNA, 7360 bp, Artificial Sequence
  Chemically synthesized sequence pBOS-mCg2a
tcaggtgtcgtgaggaattctctagagatccctcgacctcgagatccattgtgcccgggcgccaccatggagtttgggctgagctggctttttcttgtcgcgattttaaaaggtgtccagtgcgcatggtatgccgaaagggatgctgaaattgagaacgaaaagctgcgccgggaggttgaagaactgcggcaggccagcgaggcagatctccagccaggaactattgagtacgaacgccatcgacttacgcgtgcgcaggccgacgcacaggaactgaagaatgccagagactccgctgaagtggtggaaaccgcattctgtactttcgtgctgtcgcggatcgcaggtgaaattgccagtattctcgacgggctccccctgtcggtgcagcggcgttttccggaactggaaaaccgacatgttgatttcctgaaacgggatatcatcaaagccatgaacaaagcagccgcgctggatgaactgataccggggttgctgagtgaatatatcgaacagtcaggttaacaggctgcggcattttgtccgcgccgggcttcgctcactgttcaggccggagccacagaccgccgttgaatgggcggatgctaattactatctcccgaaagaatccgcataccaggaagggcgctgggaaacactgccctttcagcgggccatcatgaatgcgatgggcagcgactacatccgtgaggtgaatgtggtgaagtctgcccgtgtcggttattccaaaatgctgctgggtgtttatgcctactttatagagcataagcagcgcaacacccttatctggttgccgacggatggtgatgccgagaactttatgaaaacccacgttgagccgactattcgtgatattccgtcgctgctggcgctggccccgtggtatggcaaaaagcaccgggataacacgctcaccatgaagcgtttcactaatgggcgtggcttctggtgcctgggcggtaaagcggcaaaaaactaccgtgaaaagtcggtggatgtggcgggttatgatgaacttgctgcttttgatgatgatattgaacaggaaggctctccgacgttcctgggtgacaagcgctaaaacaacagccccatcggtctatccactggcccctgtgtgtggagatacaactggctcctcggtgactctaggatgcctggtcaagggttatttccctgagccagtgaccttgacctggaactctggatccctgtccagtggtgtgcacaccttcccagctgtcctgcagtctgacctctacaccctcagcagctcagtgactgtaacctcgagcacctggcccagccagtccatcacctgcaatgtggcccacccggcaagcagcaccaaggtggacaagaaaattgagcccagagggcccacaatcaagccctgtcctccatgcaaatgcccagcacctaacctcttgggtggaccatccgtcttcatcttccctccaaagatcaaggatgtactcatgatctccctgagccccatagtcacatgtgtggtggtggatgtgagcgaggatgacccagatgtccagatcagctggtttgtgaacaacgtggaagtacacacagctcagacacaaacccatagagaggattacaacagtactctccgggtggtcagtgccctccccatccagcaccaggactggatgagtggcaaggagttcaaatgcaaggtcaacaacaaagacctcccagcgcccatcgagagaaccatctcaaaacccaaagggtcagtaagagctccacaggtatatgtcttgcctccaccagaagaagagatgactaagaaacaggtcactctgacctgcatggtcacagacttcatgcctgaagacatttacgtggagtggaccaacaacgggaaaacagagctaaactacaagaacactgaaccagtcctggactctgatggttcttacttcatgtacagcaagctgagagtggaaaagaagaactgggtggaaagaaatagctactcctgttcagtggtccacgagggtctgcacaatcaccacacgactaagagcttctcccggactccgggtaaataagcggccgcgactctagagtgagggtccccacctgggacccttgagagtatcaggtctcccacgtgggagacaagaaatccctgtttaatatttaaacagcagtgttccccatctgggtccttgcacccctcactctggcctcagccgactgcacagcggcccctgcatccccttggctgtgaggcccctggacaagcagaggtggccagagctgggaggcatggccctggggtcccacgaatttgctggggaatctcgtttttcttcttaagacttttgggacatggtttgactcccgaacatcaccgacgtgtctcctgtttttctgggtggcctcgggacacctgccctgcccccacgagggtcaggactgtgactctttttagggccaggcaggtgcctggacatttgccttgctggacggggactggggatgtgggagggagcagacaggaggaatcatgtcaggcctgtgtgtgaaaggaagctccactgtcaccctccacctcttcaccccccactcaccagtgtcccctccactgtcacattgtaactgaacttcaggataataaagtgtttgcctccaaaaaaaaaaaaaaaaaaaaaaaaaaaaaaaaaaaaaaaaaaaaaaaaaaaaaaaaaaaaaaaaaaaaaaaaaaaaaaaccgaattcactggccgtcgttttacaacgtcgtgactgggaaaaccctggcgttacccaacttaatcgccttgcagcacatccccctttcgccagctggcgtaatagcgaagaggcccgcaccgatcgcccttcccaacagttgcgcagcctgaatggcgaatggcgcctgatgcggtattttctccttacgcatctgtgcggtatttcacaccgcatacgtcaaagcaaccatagtacgcgccctgtagcggcgcattaagcgcggcgggtgtggtggttacgcgcagcgtgaccgctacacttgccagcgccttagcgcccgctcctttcgctttcttcccttcctttctcgccacgttcgccggctttccccgtcaagctctaaatcgggggctccctttagggttccgatttagtgctttacggcacctcgaccccaaaaaacttgatttgggtgatggttcacgtagtgggccatcgccctgatagacggtttttcgccctttgacgttggagtccacgttctttaatagtggactcttgttccaaactggaacaacactcaactctatctcgggctattcttttgatttataagggattttgccgatttcggtctattggttaaaaaatgagctgatttaacaaaaatttaacgcgaattttaacaaaatattaacgtttacaattttatggtgcactctcagtacaatctgctctgatgccgcatagttaagccagccccgacacccgccaacacccgctgacgcgccctgacgggcttgtctgctcccggcatccgcttacagacaagctgtgaccgtctccgggagctgcatgtgtcagaggttttcaccgtcatcaccgaaacgcgcgagacgaaagggcctcgtgatacgcctatttttataggttaatgtcatgataataatggtttcttagacgtcaggtggcacttttcggggaaatgtgcgcggaacccctatttgtttatttttctaaatacattcaaatatgtatccgctcatgagacaataaccctgataaatgcttcaataatattgaaaaaggaagagtatgagtattcaacatttccgtgtcgcccttattcccttttttgcggcattttgccttcctgtttttgctcacccagaaacgctggtgaaagtaaaagatgctgaagatcagttgggtgcacgagtgggttacatcgaactggatctcaacagcggtaagatccttgagagttttcgccccgaagaacgttttccaatgatgagcacttttaaagttctgctatgtggcgcggtattatcccgtattgacgccgggcaagagcaactcggtcgccgcatacactattctcagaatgacttggttgagtactcaccagtcacagaaaagcatcttacggatggcatgacagtaagagaattatgcagtgctgccataaccatgagtgataacactgcggccaacttacttctgacaacgatcggaggaccgaaggagctaaccgcttttttgcacaacatgggggatcatgtaactcgccttgatcgttgggaaccggagctgaatgaagccataccaaacgacgagcgtgacaccacgatgcctgtagcaatggcaacaacgttgcgcaaactattaactggcgaactacttactctagcttcccggcaacaattaatagactggatggaggcggataaagttgcaggaccacttctgcgctcggcccttccggctggctggtttattgctgataaatctggagccggtgagcgtgggtctcgcggtatcattgcagcactggggccagatggtaagccctcccgtatcgtagttatctacacgacggggagtcaggcaactatggatgaacgaaatagacagatcgctgagataggtgcctcactgattaagcattggtaactgtcagaccaagtttactcatatatactttagattgatttaaaacttcatttttaatttaaaaggatctaggtgaagatcctttttgataatctcatgaccaaaatcccttaacgtgagttttcgttccactgagcgtcagaccccgtagaaaagatcaaaggatcttcttgagatcctttttttctgcgcgtaatctgctgcttgcaaacaaaaaaaccaccgctaccagcggtggtttgtttgccggatcaagagctaccaactctttttccgaaggtaactggcttcagcagagcgcagataccaaatactgttcttctagtgtagccgtagttaggccaccacttcaagaactctgtagcaccgcctacatacctcgctctgctaatcctgttaccagtggctgctgccagtggcgataagtcgtgtcttaccgggttggactcaagacgatagttaccggataaggcgcagcggtcgggctgaacggggggttcgtgcacacagcccagcttggagcgaacgacctacaccgaactgagatacctacagcgtgagctatgagaaagcgccacgcttcccgaagggagaaaggcggacaggtatccggtaagcggcagggtcggaacaggagagcgcacgagggagcttccagggggaaacgcctggtatctttatagtcctgtcgggtttcgccacctctgacttgagcgtcgatttttgtgatgctcgtcaggggggcggagcctatggaaaaacgccagcaacgcggcctttttacggttcctggccttttgctggccttttgctcacatgttctttcctgcgttatcccctgattctgtggataaccgtattaccgcctttgagtgagctgataccgctcgccgcagccgaacgaccgagcgcagcgagtcagtgagcgaggaagcggaagagcgcccaatacgcaaaccgcctctccccgcgcgttggccgattcattaatgcagctggcacgacaggtttcccgactggaaagcgggcagtgagcgcaacgcaattaatgtgagttagctcactcattaggcaccccaggctttacactttatgcttccggctcgtatgttgtgtggaattgtgagcggataacaatttcacacaggaaacagctatgaccatgattacgccaagcttaattccctccccagcaggcagaagtatgcaaagcatgcatctcaattagtcagcaaccatagtcccgcccctaactccgcccatcccgcccctaactccgcccagttccgcccattctccgccccatggctgactaattttttttatttatgcagaggccgaggccgcctcggcctctgagctattccagaagtagtgaggaggcttttttggaggcctaggcttttgcaaaaagctttgcaaagatggataaagttttaaacagagaggaatctttgcagctaatggaccttctaggtcttgaaaggagtgggaattggctccggtgcccgtcagtgggcagagcgcacatcgcccacagtccccgagaagttggggggaggggtcggcaattgaaccggtgcctagagaaggtggcgcggggtaaactgggaaagtgatgtcgtgtactggctccgcctttttcccgagggtgggggagaaccgtatataagtgcagtagtcgccgtgaacgttctttttcgcaacgggtttgccgccagaacacaggtaagtgccgtgtgtggttcccgcgggcctggcctctttacgggttatggcccttgcgtgccttgaattacttccacctggctgcagtacgtgattcttgatcccgagcttcgggttggaagtgggtgggagagttcgaggccttgcgcttaaggagccccttcgcctcgtgcttgagttgaggcctggcctgggcgctggggccgccgcgtgcgaatctggtggcaccttcgcgcctgtctcgctgctttcgataagtctctagccatttaaaatttttgatgacctgctgcgacgctttttttctggcaagatagtcttgtaaatgcgggccaagatctgcacactggtatttcggtttttggggccgcgggcggcgacggggcccgtgcgtcccagcgcacatgttcggcgaggcggggcctgcgagcgcggccaccgagaatcggacgggggtagtctcaagctggccggcctgctctggtgcctggcctcgcgccgccgtgtatcgccccgccctgggcggcaaggctggcccggtcggcaccagttgcgtgagcggaaagatggccgcttcccggccctgctgcagggagctcaaaatggaggacgcggcgctcgggagagcgggcgggtgagtcacccacacaaaggaaaagggcctttccgtcctcagccgtcgcttcatgtgactccacggagtaccgggcgccgtccaggcacctcgattagttctcgagcttttggagtacgtcgtctttaggttggggggaggggttttatgcgatggagtttccccacactgagtgggtggagactgaagttaggccagcttggcacttgatgtaattctccttggaatttgccctttttgagtttggatcttggttcattctcaagcctcagacagtggttcaaagtttttttcttccatt

SEQ ID NO: 854 - DNA, 6696 bp, Artificial Sequence
  Chemically synthesized sequence pBOS-mCk
tcaggtgtcgtgaggaattctctagagatccctcgacctcgagatccattgtgcccgggcgcaccatggacatgcgcgtgcccgcccagctgctgggcctgctgctgctgtggttccccggctcgcgatgcgcatggtatgccgaaagggatgctgaaattgagaacgaaaagctgcgccgggaggttgaagaactgcggcaggccagcgaggcagatctccagccaggaactattgagtacgaacgccatcgacttacgcgtgcgcaggccgacgcacaggaactgaagaatgccagagactccgctgaagtggtggaaaccgcattctgtactttcgtgctgtcgcggatcgcaggtgaaattgccagtattctcgacgggctccccctgtcggtgcagcggcgttttccggaactggaaaaccgacatgttgatttcctgaaacgggatatcatcaaagccatgaacaaagcagccgcgctggatgaactgataccggggttgctgagtgaatatatcgaacagtcaggttaacaggctgcggcattttgtccgcgccgggcttcgctcactgttcaggccggagccacagaccgccgttgaatgggcggatgctaattactatctcccgaaagaatccgcataccaggaagggcgctgggaaacactgccctttcagcgggccatcatgaatgcgatgggcagcgactacatccgtgaggtgaatgtggtgaagtctgcccgtgtcggttattccaaaatgctgctgggtgtttatgcctactttatagagcataagcagcgcaacacccttatctggttgccgacggatggtgatgccgagaactttatgaaaacccacgttgagccgactattcgtgatattccgtcgctgctggcgctggccccgtggtatggcaaaaagcaccgggataacacgctcaccatgaagcgtttcactaatgggcgtggcttctggtgcctgggcggtaaagcggcaaaaaactaccgtgaaaagtcggtggatgtggcgggttatgatgaacttgctgcttttgatgatgatattgaacaggaaggctctccgacgttcctgggtgacaagcgctgatgctgcaccaactgtatccatcttcccaccatccagtgagcagttaacatctggaggtgcctcagtcgtgtgcttcttgaacaacttctaccccaaagacatcaatgtcaagtggaagattgatggcagtgaacgacaaaatggcgtcctgaacagttggactgatcaggacagcaaagacagcacctacagcatgagcagcaccctcacgttgaccaaggacgagtatgaacgacataacagctatacctgtgaggccactcacaagacatcaacttcacccattgtcaagagcttcaacaggaatgagtgttaagcggccgcgactctagagtgagggtccccacctgggacccttgagagtatcaggtctcccacgtgggagacaagaaatccctgtttaatatttaaacagcagtgttccccatctgggtccttgcacccctcactctggcctcagccgactgcacagcggcccctgcatccccttggctgtgaggcccctggacaagcagaggtggccagagctgggaggcatggccctggggtcccacgaatttgctggggaatctcgtttttcttcttaagacttttgggacatggtttgactcccgaacatcaccgacgtgtctcctgtttttctgggtggcctcgggacacctgccctgcccccacgagggtcaggactgtgactctttttagggccaggcaggtgcctggacatttgccttgctggacggggactggggatgtgggagggagcagacaggaggaatcatgtcaggcctgtgtgtgaaaggaagctccactgtcaccctccacctcttcaccccccactcaccagtgtcccctccactgtcacattgtaactgaacttcaggataataaagtgtttgcctccaaaaaaaaaaaaaaaaaaaaaaaaaaaaaaaaaaaaaaaaaaaaaaaaaaaaaaaaaaaaaaaaaaaaaaaaaaaaaaaccgaattcactggccgtcgttttacaacgtcgtgactgggaaaaccctggcgttacccaacttaatcgccttgcagcacatccccctttcgccagctggcgtaatagcgaagaggcccgcaccgatcgcccttcccaacagttgcgcagcctgaatggcgaatggcgcctgatgcggtattttctccttacgcatctgtgcggtatttcacaccgcatacgtcaaagcaaccatagtacgcgccctgtagcggcgcattaagcgcggcgggtgtggtggttacgcgcagcgtgaccgctacacttgccagcgccttagcgcccgctcctttcgctttcttcccttcctttctcgccacgttcgccggctttccccgtcaagctctaaatcgggggctccctttagggttccgatttagtgctttacggcacctcgaccccaaaaaacttgatttgggtgatggttcacgtagtgggccatcgccctgatagacggtttttcgccctttgacgttggagtccacgttctttaatagtggactcttgttccaaactggaacaacactcaactctatctcgggctattcttttgatttataagggattttgccgatttcggtctattggttaaaaaatgagctgatttaacaaaaatttaacgcgaattttaacaaaatattaacgtttacaattttatggtgcactctcagtacaatctgctctgatgccgcatagttaagccagccccgacacccgccaacacccgctgacgcgccctgacgggcttgtctgctcccggcatccgcttacagacaagctgtgaccgtctccgggagctgcatgtgtcagaggttttcaccgtcatcaccgaaacgcgcgagacgaaagggcctcgtgatacgcctatttttataggttaatgtcatgataataatggtttcttagacgtcaggtggcacttttcggggaaatgtgcgcggaacccctatttgtttatttttctaaatacattcaaatatgtatccgctcatgagacaataaccctgataaatgcttcaataatattgaaaaaggaagagtatgagtattcaacatttccgtgtcgcccttattcccttttttgcggcattttgccttcctgtttttgctcacccagaaacgctggtgaaagtaaaagatgctgaagatcagttgggtgcacgagtgggttacatcgaactggatctcaacagcggtaagatccttgagagttttcgccccgaagaacgttttccaatgatgagcacttttaaagttctgctatgtggcgcggtattatcccgtattgacgccgggcaagagcaactcggtcgccgcatacactattctcagaatgacttggttgagtactcaccagtcacagaaaagcatcttacggatggcatgacagtaagagaattatgcagtgctgccataaccatgagtgataacactgcggccaacttacttctgacaacgatcggaggaccgaaggagctaaccgcttttttgcacaacatgggggatcatgtaactcgccttgatcgttgggaaccggagctgaatgaagccataccaaacgacgagcgtgacaccacgatgcctgtagcaatggcaacaacgttgcgcaaactattaactggcgaactacttactctagcttcccggcaacaattaatagactggatggaggcggataaagttgcaggaccacttctgcgctcggcccttccggctggctggtttattgctgataaatctggagccggtgagcgtgggtctcgcggtatcattgcagcactggggccagatggtaagccctcccgtatcgtagttatctacacgacggggagtcaggcaactatggatgaacgaaatagacagatcgctgagataggtgcctcactgattaagcattggtaactgtcagaccaagtttactcatatatactttagattgatttaaaacttcatttttaatttaaaaggatctaggtgaagatcctttttgataatctcatgaccaaaatcccttaacgtgagttttcgttccactgagcgtcagaccccgtagaaaagatcaaaggatcttcttgagatcctttttttctgcgcgtaatctgctgcttgcaaacaaaaaaaccaccgctaccagcggtggtttgtttgccggatcaagagctaccaactctttttccgaaggtaactggcttcagcagagcgcagataccaaatactgttcttctagtgtagccgtagttaggccaccacttcaagaactctgtagcaccgcctacatacctcgctctgctaatcctgttaccagtggctgctgccagtggcgataagtcgtgtcttaccgggttggactcaagacgatagttaccggataaggcgcagcggtcgggctgaacggggggttcgtgcacacagcccagcttggagcgaacgacctacaccgaactgagatacctacagcgtgagctatgagaaagcgccacgcttcccgaagggagaaaggcggacaggtatccggtaagcggcagggtcggaacaggagagcgcacgagggagcttccagggggaaacgcctggtatctttatagtcctgtcgggtttcgccacctctgacttgagcgtcgatttttgtgatgctcgtcaggggggcggagcctatggaaaaacgccagcaacgcggcctttttacggttcctggccttttgctggccttttgctcacatgttctttcctgcgttatcccctgattctgtggataaccgtattaccgcctttgagtgagctgataccgctcgccgcagccgaacgaccgagcgcagcgagtcagtgagcgaggaagcggaagagcgcccaatacgcaaaccgcctctccccgcgcgttggccgattcattaatgcagctggcacgacaggtttcccgactggaaagcgggcagtgagcgcaacgcaattaatgtgagttagctcactcattaggcaccccaggctttacactttatgcttccggctcgtatgttgtgtggaattgtgagcggataacaatttcacacaggaaacagctatgaccatgattacgccaagcttaattccctccccagcaggcagaagtatgcaaagcatgcatctcaattagtcagcaaccatagtcccgcccctaactccgcccatcccgcccctaactccgcccagttccgcccattctccgccccatggctgactaattttttttatttatgcagaggccgaggccgcctcggcctctgagctattccagaagtagtgaggaggcttttttggaggcctaggcttttgcaaaaagctttgcaaagatggataaagttttaaacagagaggaatctttgcagctaatggaccttctaggtcttgaaaggagtgggaattggctccggtgcccgtcagtgggcagagcgcacatcgcccacagtccccgagaagttggggggaggggtcggcaattgaaccggtgcctagagaaggtggcgcggggtaaactgggaaagtgatgtcgtgtactggctccgcctttttcccgagggtgggggagaaccgtatataagtgcagtagtcgccgtgaacgttctttttcgcaacgggtttgccgccagaacacaggtaagtgccgtgtgtggttcccgcgggcctggcctctttacgggttatggcccttgcgtgccttgaattacttccacctggctgcagtacgtgattcttgatcccgagcttcgggttggaagtgggtgggagagttcgaggccttgcgcttaaggagccccttcgcctcgtgcttgagttgaggcctggcctgggcgctggggccgccgcgtgcgaatctggtggcaccttcgcgcctgtctcgctgctttcgataagtctctagccatttaaaatttttgatgacctgctgcgacgctttttttctggcaagatagtcttgtaaatgcgggccaagatctgcacactggtatttcggtttttggggccgcgggcggcgacggggcccgtgcgtcccagcgcacatgttcggcgaggcggggcctgcgagcgcggccaccgagaatcggacgggggtagtctcaagctggccggcctgctctggtgcctggcctcgcgccgccgtgtatcgccccgccctgggcggcaaggctggcccggtcggcaccagttgcgtgagcggaaagatggccgcttcccggccctgctgcagggagctcaaaatggaggacgcggcgctcgggagagcgggcgggtgagtcacccacacaaaggaaaagggcctttccgtcctcagccgtcgcttcatgtgactccacggagtaccgggcgccgtccaggcacctcgattagttctcgagcttttggagtacgtcgtctttaggttggggggaggggttttatgcgatggagtttccccacactgagtgggtggagactgaagttaggccagcttggcacttgatgtaattctccttggaatttgccctttttgagtttggatcttggttcattctcaagcctcagacagtggttcaaagtttttttcttccatt

SEQ ID NO: 855 - DNA, 7360 bp, Artificial Sequence
  Chemically synthesized sequence pBOS-hCg1,z,a-
tcaggtgtcgtgaggaattctctagagatccctcgacctcgagatccattgtgcccgggcgccaccatggagtttgggctgagctggctttttcttgtcgcgattttaaaaggtgtccagtgcgcatggtatgccgaaagggatgctgaaattgagaacgaaaagctgcgccgggaggttgaagaactgcggcaggccagcgaggcagatctccagccaggaactattgagtacgaacgccatcgacttacgcgtgcgcaggccgacgcacaggaactgaagaatgccagagactccgctgaagtggtggaaaccgcattctgtactttcgtgctgtcgcggatcgcaggtgaaattgccagtattctcgacgggctccccctgtcggtgcagcggcgttttccggaactggaaaaccgacatgttgatttcctgaaacgggatatcatcaaagccatgaacaaagcagccgcgctggatgaactgataccggggttgctgagtgaatatatcgaacagtcaggttaacaggctgcggcattttgtccgcgccgggcttcgctcactgttcaggccggagccacagaccgccgttgaatgggcggatgctaattactatctcccgaaagaatccgcataccaggaagggcgctgggaaacactgccctttcagcgggccatcatgaatgcgatgggcagcgactacatccgtgaggtgaatgtggtgaagtctgcccgtgtcggttattccaaaatgctgctgggtgtttatgcctactttatagagcataagcagcgcaacacccttatctggttgccgacggatggtgatgccgagaactttatgaaaacccacgttgagccgactattcgtgatattccgtcgctgctggcgctggccccgtggtatggcaaaaagcaccgggataacacgctcaccatgaagcgtttcactaatgggcgtggcttctggtgcctgggcggtaaagcggcaaaaaactaccgtgaaaagtcggtggatgtggcgggttatgatgaacttgctgcttttgatgatgatattgaacaggaaggctctccgacgttcctgggtgacaagcgcgtcgaccaagggcccatcggtcttccccctggcaccctcctccaagagcacctctgggggcacagcggccctgggctgcctggtcaaggactacttccccgaaccggtgacggtgtcgtggaactcaggcgccctgaccagcggcgtgcacaccttcccggctgtcctacagtcctcaggactctactccctcagcagcgtggtgaccgtgccctccagcagcttgggcacccagacctacatctgcaacgtgaatcacaagcccagcaacaccaaggtggacaagaaagttgagcccaaatcttgtgacaaaactcacacatgcccaccgtgcccagcacctgaactcctggggggaccgtcagtcttcctcttccccccaaaacccaaggacaccctcatgatctcccggacccctgaggtcacatgcgtggtggtggacgtgagccacgaagaccctgaggtcaagttcaactggtacgtggacggcgtggaggtgcataatgccaagacaaagccgcgggaggagcagtacaacagcacgtaccgtgtggtcagcgtcctcaccgtcctgcaccaggactggctgaatggcaaggagtacaagtgcaaggtctccaacaaagccctcccagcccccatcgagaaaaccatctccaaagccaaagggcagccccgagaaccacaggtgtacaccctgcccccatcccgggatgagctgaccaagaaccaggtcagcctgacctgcctggtcaaaggcttctatcccagcgacatcgccgtggagtgggagagcaatgggcagccggagaacaactacaagaccacgcctcccgtgctggactccgacggctccttcttcctctacagcaagctcaccgtggacaagagcaggtggcagcaggggaacgtcttctcatgctccgtgatgcatgaggctctgcacaaccactacacgcagaagagcctctccctgtctccgggtaaatgagcggccgcgactctagagtgagggtccccacctgggacccttgagagtatcaggtctcccacgtgggagacaagaaatccctgtttaatatttaaacagcagtgttccccatctgggtccttgcacccctcactctggcctcagccgactgcacagcggcccctgcatccccttggctgtgaggcccctggacaagcagaggtggccagagctgggaggcatggccctggggtcccacgaatttgctggggaatctcgtttttcttcttaagacttttgggacatggtttgactcccgaacatcaccgacgtgtctcctgtttttctgggtggcctcgggacacctgccctgcccccacgagggtcaggactgtgactctttttagggccaggcaggtgcctggacatttgccttgctggacggggactggggatgtgggagggagcagacaggaggaatcatgtcaggcctgtgtgtgaaaggaagctccactgtcaccctccacctcttcaccccccactcaccagtgtcccctccactgtcacattgtaactgaacttcaggataataaagtgtttgcctccaaaaaaaaaaaaaaaaaaaaaaaaaaaaaaaaaaaaaaaaaaaaaaaaaaaaaaaaaaaaaaaaaaaaaaaaaaaaaaaccgaattcactggccgtcgttttacaacgtcgtgactgggaaaaccctggcgttacccaacttaatcgccttgcagcacatccccctttcgccagctggcgtaatagcgaagaggcccgcaccgatcgcccttcccaacagttgcgcagcctgaatggcgaatggcgcctgatgcggtattttctccttacgcatctgtgcggtatttcacaccgcatacgtcaaagcaaccatagtacgcgccctgtagcggcgcattaagcgcggcgggtgtggtggttacgcgcagcgtgaccgctacacttgccagcgccttagcgcccgctcctttcgctttcttcccttcctttctcgccacgttcgccggctttccccgtcaagctctaaatcgggggctccctttagggttccgatttagtgctttacggcacctcgaccccaaaaaacttgatttgggtgatggttcacgtagtgggccatcgccctgatagacggtttttcgccctttgacgttggagtccacgttctttaatagtggactcttgttccaaactggaacaacactcaactctatctcgggctattcttttgatttataagggattttgccgatttcggtctattggttaaaaaatgagctgatttaacaaaaatttaacgcgaattttaacaaaatattaacgtttacaattttatggtgcactctcagtacaatctgctctgatgccgcatagttaagccagccccgacacccgccaacacccgctgacgcgccctgacgggcttgtctgctcccggcatccgcttacagacaagctgtgaccgtctccgggagctgcatgtgtcagaggttttcaccgtcatcaccgaaacgcgcgagacgaaagggcctcgtgatacgcctatttttataggttaatgtcatgataataatggtttcttagacgtcaggtggcacttttcggggaaatgtgcgcggaacccctatttgtttatttttctaaatacattcaaatatgtatccgctcatgagacaataaccctgataaatgcttcaataatattgaaaaaggaagagtatgagtattcaacatttccgtgtcgcccttattcccttttttgcggcattttgccttcctgtttttgctcacccagaaacgctggtgaaagtaaaagatgctgaagatcagttgggtgcacgagtgggttacatcgaactggatctcaacagcggtaagatccttgagagttttcgccccgaagaacgttttccaatgatgagcacttttaaagttctgctatgtggcgcggtattatcccgtattgacgccgggcaagagcaactcggtcgccgcatacactattctcagaatgacttggttgagtactcaccagtcacagaaaagcatcttacggatggcatgacagtaagagaattatgcagtgctgccataaccatgagtgataacactgcggccaacttacttctgacaacgatcggaggaccgaaggagctaaccgcttttttgcacaacatgggggatcatgtaactcgccttgatcgttgggaaccggagctgaatgaagccataccaaacgacgagcgtgacaccacgatgcctgtagcaatggcaacaacgttgcgcaaactattaactggcgaactacttactctagcttcccggcaacaattaatagactggatggaggcggataaagttgcaggaccacttctgcgctcggcccttccggctggctggtttattgctgataaatctggagccggtgagcgtgggtctcgcggtatcattgcagcactggggccagatggtaagccctcccgtatcgtagttatctacacgacggggagtcaggcaactatggatgaacgaaatagacagatcgctgagataggtgcctcactgattaagcattggtaactgtcagaccaagtttactcatatatactttagattgatttaaaacttcatttttaatttaaaaggatctaggtgaagatcctttttgataatctcatgaccaaaatcccttaacgtgagttttcgttccactgagcgtcagaccccgtagaaaagatcaaaggatcttcttgagatcctttttttctgcgcgtaatctgctgcttgcaaacaaaaaaaccaccgctaccagcggtggtttgtttgccggatcaagagctaccaactctttttccgaaggtaactggcttcagcagagcgcagataccaaatactgttcttctagtgtagccgtagttaggccaccacttcaagaactctgtagcaccgcctacatacctcgctctgctaatcctgttaccagtggctgctgccagtggcgataagtcgtgtcttaccgggttggactcaagacgatagttaccggataaggcgcagcggtcgggctgaacggggggttcgtgcacacagcccagcttggagcgaacgacctacaccgaactgagatacctacagcgtgagctatgagaaagcgccacgcttcccgaagggagaaaggcggacaggtatccggtaagcggcagggtcggaacaggagagcgcacgagggagcttccagggggaaacgcctggtatctttatagtcctgtcgggtttcgccacctctgacttgagcgtcgatttttgtgatgctcgtcaggggggcggagcctatggaaaaacgccagcaacgcggcctttttacggttcctggccttttgctggccttttgctcacatgttctttcctgcgttatcccctgattctgtggataaccgtattaccgcctttgagtgagctgataccgctcgccgcagccgaacgaccgagcgcagcgagtcagtgagcgaggaagcggaagagcgcccaatacgcaaaccgcctctccccgcgcgttggccgattcattaatgcagctggcacgacaggtttcccgactggaaagcgggcagtgagcgcaacgcaattaatgtgagttagctcactcattaggcaccccaggctttacactttatgcttccggctcgtatgttgtgtggaattgtgagcggataacaatttcacacaggaaacagctatgaccatgattacgccaagcttaattccctccccagcaggcagaagtatgcaaagcatgcatctcaattagtcagcaaccatagtcccgcccctaactccgcccatcccgcccctaactccgcccagttccgcccattctccgccccatggctgactaattttttttatttatgcagaggccgaggccgcctcggcctctgagctattccagaagtagtgaggaggcttttttggaggcctaggcttttgcaaaaagctttgcaaagatggataaagttttaaacagagaggaatctttgcagctaatggaccttctaggtcttgaaaggagtgggaattggctccggtgcccgtcagtgggcagagcgcacatcgcccacagtccccgagaagttggggggaggggtcggcaattgaaccggtgcctagagaaggtggcgcggggtaaactgggaaagtgatgtcgtgtactggctccgcctttttcccgagggtgggggagaaccgtatataagtgcagtagtcgccgtgaacgttctttttcgcaacgggtttgccgccagaacacaggtaagtgccgtgtgtggttcccgcgggcctggcctctttacgggttatggcccttgcgtgccttgaattacttccacctggctgcagtacgtgattcttgatcccgagcttcgggttggaagtgggtgggagagttcgaggccttgcgcttaaggagccccttcgcctcgtgcttgagttgaggcctggcctgggcgctggggccgccgcgtgcgaatctggtggcaccttcgcgcctgtctcgctgctttcgataagtctctagccatttaaaatttttgatgacctgctgcgacgctttttttctggcaagatagtcttgtaaatgcgggccaagatctgcacactggtatttcggtttttggggccgcgggcggcgacggggcccgtgcgtcccagcgcacatgttcggcgaggcggggcctgcgagcgcggccaccgagaatcggacgggggtagtctcaagctggccggcctgctctggtgcctggcctcgcgccgccgtgtatcgccccgccctgggcggcaaggctggcccggtcggcaccagttgcgtgagcggaaagatggccgcttcccggccctgctgcagggagctcaaaatggaggacgcggcgctcgggagagcgggcgggtgagtcacccacacaaaggaaaagggcctttccgtcctcagccgtcgcttcatgtgactccacggagtaccgggcgccgtccaggcacctcgattagttctcgagcttttggagtacgtcgtctttaggttggggggaggggttttatgcgatggagtttccccacactgagtgggtggagactgaagttaggccagcttggcacttgatgtaattctccttggaatttgccctttttgagtttggatcttggttcattctcaagcctcagacagtggttcaaagtttttttcttccatt

SEQ ID NO: 856 - protein, 5 aa, Artificial Sequence
  Chemically synthesized H1-1
  misc_feature (1)..(3): Xaa can be any naturally occurring amino acid
XXXMM

SEQ ID NO: 857 - protein, 5 aa, Artificial Sequence
  Chemically synthesized H1-2
  misc_feature (2)..(4): Xaa can be any naturally occurring amino acid
EXXXM

SEQ ID NO: 858 - protein, 5 aa, Artificial Sequence
  Chemically synthesized H1-3
  misc_feature (3)..(5): Xaa can be any naturally occurring amino acid
EYXXX

SEQ ID NO: 859 - protein, 5 aa, Artificial Sequence
  Chemically synthesized H1-4
  misc_feature (1)..(1): Xaa can be any naturally occurring amino acid
  misc_feature (3)..(3): Xaa can be any naturally occurring amino acid
  misc_feature (5)..(5): Xaa can be any naturally occurring amino acid
XYXMX

SEQ ID NO: 860 - protein, 17 aa, Artificial Sequence
  Chemically synthesized H2-1
  misc_feature (1)..(3): Xaa can be any naturally occurring amino acid
XXXQDGKNTYYADSVKG

SEQ ID NO: 861 - protein, 17 aa, Artificial Sequence
  Chemically synthesized H2-2
  misc_feature (2)..(4): Xaa can be any naturally occurring amino acid
RXXXDGKNTYYADSVKG

SEQ ID NO: 862 - protein, 17 aa, Artificial Sequence
  Chemically synthesized H2-3
  misc_feature (3)..(5): Xaa can be any naturally occurring amino acid
RIXXXGKNTYYADSVKG

SEQ ID NO: 863 - protein, 17 aa, Artificial Sequence
  Chemically synthesized H2-4
  misc_feature (4)..(6): Xaa can be any naturally occurring amino acid
RIGXXXKNTYYADSVKG

SEQ ID NO: 864 - protein, 17 aa, Artificial Sequence
  Chemically synthesized H2-5
  misc_feature (5)..(7): Xaa can be any naturally occurring amino acid
RIGQXXXNTYYADSVKG

SEQ ID NO: 865 - protein, 17 aa, Artificial Sequence
  Chemically synthesized H2-6
  misc_feature (6)..(8): Xaa can be any naturally occurring amino acid
RIGQDXXXTYYADSVKG

SEQ ID NO: 866 - protein, 17 aa, Artificial Sequence
  Chemically synthesized H2-7
  misc_feature (7)..(9): Xaa can be any naturally occurring amino acid
RIGQDGXXXYYADSVKG

SEQ ID NO: 867 - protein, 17 aa, Artificial Sequence
  Chemically synthesized H2-8
  misc_feature (8)..(10): Xaa can be any naturally occurring amino acid
RIGQDGKXXXYADSVKG

SEQ ID NO: 868 - protein, 17 aa, Artificial Sequence
  Chemically synthesized H2-9
  misc_feature (9)..(11): Xaa can be any naturally occurring amino acid
RIGQDGKNXXXADSVKG

SEQ ID NO: 869 - protein, 17 aa, Artificial Sequence
  Chemically synthesized H2-10
  misc_feature (10)..(12): Xaa can be any naturally occurring amino acid
RIGQDGKNTXXXDSVKG

SEQ ID NO: 870 - protein, 17 aa, Artificial Sequence
  Chemically synthesized H2-11
  misc_feature (11)..(13): Xaa can be any naturally occurring amino acid
RIGQDGKNTYXXXSVKG

SEQ ID NO: 871 - protein, 17 aa, Artificial Sequence
  Chemically synthesized H2-12
  misc_feature (12)..(14): Xaa can be any naturally occurring amino acid
RIGQDGKNTYYXXXVKG

SEQ ID NO: 872 - protein, 17 aa, Artificial Sequence
  Chemically synthesized H2-13
  misc_feature (13)..(15): Xaa can be any naturally occurring amino acid
RIGQDGKNTYYAXXXKG

SEQ ID NO: 873 - protein, 17 aa, Artificial Sequence
  Chemically synthesized H2-14
  misc_feature (14)..(16): Xaa can be any naturally occurring amino acid
RIGQDGKNTYYADXXXG

SEQ ID NO: 874 - protein, 17 aa, Artificial Sequence
  Chemically synthesized H2-15
  misc_feature (15)..(17): Xaa can be any naturally occurring amino acid
RIGQDGKNTYYADSXXX

SEQ ID NO: 875 - protein, 13 aa, Artificial Sequence
  Chemically synthesized H3-1
  misc_feature (1)..(3): Xaa can be any naturally occurring amino acid
XXXRVGVHHLFDY

SEQ ID NO: 876 - protein, 13 aa, Artificial Sequence
  Chemically synthesized H3-2
  misc_feature (2)..(4): Xaa can be any naturally occurring amino acid
YXXXVGVHHLFDY

SEQ ID NO: 877 - protein, 13 aa, Artificial Sequence
  Chemically synthesized H3-3
  misc_feature (3)..(5): Xaa can be any naturally occurring amino acid
YTXXXGVHHLFDY

SEQ ID NO: 878 - protein, 13 aa, Artificial Sequence
  Chemically synthesized H3-4
  misc_feature (4)..(6): Xaa can be any naturally occurring amino acid
YTGXXXVHHLFDY

SEQ ID NO: 879 - protein, 13 aa, Artificial Sequence
  Chemically synthesized H3-5
  misc_feature (5)..(7): Xaa can be any naturally occurring amino acid
YTGRXXXHHLFDY

SEQ ID NO: 880 - protein, 13 aa, Artificial Sequence
  Chemically synthesized H3-6
  misc_feature (6)..(8): Xaa can be any naturally occurring amino acid
YTGRVXXXHLFDY

SEQ ID NO: 881 - protein, 13 aa, Artificial Sequence
  Chemically synthesized H3-7
  misc_feature (7)..(9): Xaa can be any naturally occurring amino acid
YTGRVGXXXLFDY

SEQ ID NO: 882 - protein, 13 aa, Artificial Sequence
  Chemically synthesized H3-8
  misc_feature (8)..(10): Xaa can be any naturally occurring amino acid
YTGRVGVXXXFDY

SEQ ID NO: 883 - protein, 13 aa, Artificial Sequence
  Chemically synthesized H3-9
  misc_feature (9)..(11): Xaa can be any naturally occurring amino acid
YTGRVGVHXXXDY

SEQ ID NO: 884 - protein, 13 aa, Artificial Sequence
  Chemically synthesized H3-10
  misc_feature (10)..(12): Xaa can be any naturally occurring amino acid
YTGRVGVHHXXXY

SEQ ID NO: 885 - protein, 13 aa, Artificial Sequence
  Chemically synthesized H3-11
  misc_feature (11)..(13): Xaa can be any naturally occurring amino acid
YTGRVGVHHLXXX

SEQ ID NO: 886 - protein, 35 aa, Artificial Sequence
  Chemically synthesized ABT-2108
EYTMMRIGQDGKNTYYADSVKGYTGRVGVHHLFDY

SEQ ID NO: 887 - protein, 35 aa, Artificial Sequence
  Chemically synthesized ABT-2501
WEGMMRIGQDGKNTYYADSVKGYTGRVGVHHLFDY

SEQ ID NO: 888 - protein, 35 aa, Artificial Sequence
  Chemically synthesized ABT-2502
MESMMRIGQDGKNTYYADSVKGYTGRVGVHHLFDY

SEQ ID NO: 889 - protein, 35 aa, Artificial Sequence
  Chemically synthesized ABT-2503
EEKWMRIGQDGKNTYYADSVKGYTGRVGVHHLFDY

SEQ ID NO: 890 - protein, 35 aa, Artificial Sequence
  Chemically synthesized ABT-2504
DEGMMRIGQDGKNTYYADSVKGYTGRVGVHHLFDY

SEQ ID NO: 891 - protein, 35 aa, Artificial Sequence
  Chemically synthesized ABT-2505
EYGLIRIGQDGKNTYYADSVKGYTGRVGVHHLFDY

SEQ ID NO: 892 - protein, 35 aa, Artificial Sequence
  Chemically synthesized ABT-2506
EYTMMRCHEDGKNTYYADSVKGYTGRVGVHHLFDY

SEQ ID NO: 893 - protein, 35 aa, Artificial Sequence
  Chemically synthesized ABT-2507
EYTMMRITWTGKNTYYADSVKGYTGRVGVHHLFDY

SEQ ID NO: 894 - protein, 35 aa, Artificial Sequence
  Chemically synthesized ABT-2508
EYTMMRIGYMDKNTYYADSVKGYTGRVGVHHLFDY

SEQ ID NO: 895 - protein, 35 aa, Artificial Sequence
  Chemically synthesized ABT-2509
EYTMMRITYSGKNTYYADSVKGYTGRVGVHHLFDY

SEQ ID NO: 896 - protein, 35 aa, Artificial Sequence
  Chemically synthesized ABT-2510
EYTMMRCVWDGKNTYYADSVKGYTGRVGVHHLFDY

SEQ ID NO: 897 - protein, 35 aa, Artificial Sequence
  Chemically synthesized ABT-2511
EYTMMRIGQDGKNTVIRDSVKGYTGRVGVHHLFDY

SEQ ID NO: 898 - protein, 35 aa, Artificial Sequence
  Chemically synthesized ABT-2512
EYTMMRIGQDGKNTVLRDSVKGYTGRVGVHHLFDY

SEQ ID NO: 899 - protein, 35 aa, Artificial Sequence
  Chemically synthesized ABT-2513
EYTMMRIGQDGKNTVDRDSVKGYTGRVGVHHLFDY

SEQ ID NO: 900 - protein, 35 aa, Artificial Sequence
  Chemically synthesized ABT-2514
EYTMMRIGQDGKNTWTRDSVKGYTGRVGVHHLFDY

SEQ ID NO: 901 - protein, 35 aa, Artificial Sequence
  Chemically synthesized ABT-2515
EYTMMRIGQDGKNTYYRGYMKGYTGRVGVHHLFDY

SEQ ID NO: 902 - protein, 35 aa, Artificial Sequence
  Chemically synthesized ABT-2516
EYTMMRIGQDGKNTYYRVDVKGYTGRVGVHHLFDY

SEQ ID NO: 903 - protein, 35 aa, Artificial Sequence
  Chemically synthesized ABT-2517
EYTMMRIGQDGKNTYYADRTDGYTGRVGVHHLFDY

SEQ ID NO: 904 - protein, 35 aa, Artificial Sequence
  Chemically synthesized ABT-2518
EYTMMRIGQDGKNTYYRMDVKGYTGRVGVHHLFDY

SEQ ID NO: 905 - protein, 35 aa, Artificial Sequence
  Chemically synthesized ABT-2519
EYTMMRIGQDGKNTYARMSVKGYTGRVGVHHLFDY

SEQ ID NO: 906 - protein, 35 aa, Artificial Sequence
  Chemically synthesized ABT-2520
EYTMMRIGQDGKNTYYADRSFGYTGRVGVHHLFDY

SEQ ID NO: 907 - protein, 35 aa, Artificial Sequence
  Chemically synthesized ABT-2521
EYTMMRIGQDGKNTYYADSVKGYTGRILGHHLFDY

SEQ ID NO: 908 - protein, 35 aa, Artificial Sequence
  Chemically synthesized ABT-2522
EYTMMRIGQDGKNTYYADSVKGYTGRILHHHLFDY

SEQ ID NO: 909 - protein, 35 aa, Artificial Sequence
  Chemically synthesized ABT-2523
EYTMMRIGQDGKNTYYADSVKGYDGWVGVHHLFDY

SEQ ID NO: 910 - protein, 35 aa, Artificial Sequence
  Chemically synthesized ABT-2524
EYTMMRIGQDGKNTYYADSVKGYTGRVFNHHLFDY

SEQ ID NO: 911 - protein, 35 aa, Artificial Sequence
  Chemically synthesized ABT-2525
EYTMMRIGQDGKNTYYADSVKGYTGRILAHHLFDY

SEQ ID NO: 912 - protein, 35 aa, Artificial Sequence
  Chemically synthesized ABT-2526
EYTMMRIGQDGKNTYYADSVKGYTGRVLNHHLFDY

SEQ ID NO: 913 - protein, 35 aa, Artificial Sequence
  Chemically synthesized ABT-2527
EYTMMRIGQDGKNTYYADSVKGYTGRVFKHHLFDY

SEQ ID NO: 914 - protein, 35 aa, Artificial Sequence
  Chemically synthesized ABT-2528
EYTMMRIGQDGKNTYYADSVKGYTGRVLGHHLFDY

SEQ ID NO: 915 - protein, 35 aa, Artificial Sequence
  Chemically synthesized ABT-2529
EEGMMRIGQDGKNTYYADSVKGYTGRVGVHHLFDY

SEQ ID NO: 916 - protein, 35 aa, Artificial Sequence
  Chemically synthesized ABT-2530
EYTMMRIGQDGKNTYYADSVKGYTGRILEHHLFDY

SEQ ID NO: 917 - protein, 35 aa, Artificial Sequence
  Chemically synthesized ABT-2531
EYTMMRIGQDGKNTYYADSVKGYTGRIFSHHLFDY

SEQ ID NO: 918 - protein, 35 aa, Artificial Sequence
  Chemically synthesized ABT-2532
EYTMMRIGQDGKNTYYADSVKGYTGRIFLHHLFDY

SEQ ID NO: 919 - protein, 35 aa, Artificial Sequence
  Chemically synthesized ABT-2533x
DEGMMRIGQDGKNTYYADSVKGYTGRILGHHLFDY

SEQ ID NO: 920 - protein, 35 aa, Artificial Sequence
  Chemically synthesized ABT-2534x
DEGMMRITYSGKNTYYADSVKGYTGRIFSHHLFDY

SEQ ID NO: 921 - protein, 35 aa, Artificial Sequence
  Chemically synthesized ABT-2535x
DEGMMRIGQDGKNTYYADSVKGYTGRIFSHHLFDY

SEQ ID NO: 922 - protein, 35 aa, Artificial Sequence
  Chemically synthesized ABT-2536x
EEKWMRIGQDGKNTYYADSVKGYTGRILGHHLFDY

SEQ ID NO: 923 - protein, 35 aa, Artificial Sequence
  Chemically synthesized ABT-2537x
DEGMMRIGQDGKNTYYRMDVKGYTGRILGHHLFDY

SEQ ID NO: 924 - protein, 35 aa, Artificial Sequence
  Chemically synthesized ABT-2538x
DEGMMRITYSGKNTYYADSVKGYTGRILGHHLFDY

SEQ ID NO: 925 - DNA, 17 bp, Artificial Sequence
  Synthetic oligonucleotide
tcgcgatgcgcatggta

SEQ ID NO: 926 - DNA, 17 bp, Artificial Sequence
  Synthetic oligonucleotide
taccatgcgcatcgcga

SEQ ID NO: 927 - DNA, 15 bp, Artificial Sequence
  Synthetic oligonucleotide
acaagcgctgatgct

SEQ ID NO: 928 - DNA, 15 bp, Artificial Sequence
  Synthetic oligonucleotide
agcatcagcgcttgt

SEQ ID NO: 929 - DNA, 17 bp, Artificial Sequence
  Synthetic oligonucleotide
gtccagtgcgcatggta

SEQ ID NO: 930 - DNA, 17 bp, Artificial Sequence
  Synthetic oligonucleotide
taccatgcgcactggac

SEQ ID NO: 931 - DNA, 15 bp, Artificial Sequence
  Synthetic oligonucleotide
acaagcgctaaaaca

SEQ ID NO: 932 - DNA, 15 bp, Artificial Sequence
  Synthetic oligonucleotide
tgttttagcgcttgt

SEQ ID NO: 933 - DNA, 15 bp, Artificial Sequence
  Synthetic oligonucleotide
aagctacgtacggtg

SEQ ID NO: 934 - DNA, 15 bp, Artificial Sequence
  Synthetic oligonucleotide
caccgtacgtagctt

SEQ ID NO: 935 - DNA, 17 bp, Artificial Sequence
  Synthetic oligonucleotide
agcttatcgcgaaaggg

SEQ ID NO: 936 - DNA, 17 bp, Artificial Sequence
  Synthetic oligonucleotide
ccctttcgcgataagct

SEQ ID NO: 937 - DNA, 14 bp, Artificial Sequence
  Synthetic oligonucleotide
acaagcgttaaccc

SEQ ID NO: 938 - DNA, 14 bp, Artificial Sequence
  Synthetic oligonucleotide
gggttaacgcttca

SEQ ID NO: 939 - DNA, 15 bp, Artificial Sequence
  Synthetic oligonucleotide
acaagcgcgtcgacc

SEQ ID NO: 940 - DNA, 15 bp, Artificial Sequence
  Synthetic oligonucleotide
ggtcgacgcgcttgt

SEQ ID NO: 941 - protein, 108 aa, Artificial Sequence
  Chemically synthesized ABTI-95-1
DIQMTQSPSSLSASVGDRVTITCRASQPIHGNLRWYQQKPGKAPKLLIYNISNLQSGVPSRFSGSGSGTDFTLTISSLQPEDFATYHCQQGYRWPVTFGQGTKVEIKR

SEQ ID NO: 942 - protein, 108 aa, Artificial Sequence
  Chemically synthesized ABT1-95-2
DIQMTQSPSSLSASVGDRVTITCRASQPIHGNLRWYQQKPGKAPKLLIYSSSYLQSGVPSRFSGSGSGTDFTLTISSLQPEDFATYYCQQGYRWPVTFGQGTKVEIKR

SEQ ID NO: 943 - protein, 108 aa, Artificial Sequence
  Chemically synthesized ABTI-95-4
DIQMTQSPSSLSASVGDRVTITCRASQPIVRNLRWYQQKPGKAPKLLIYSSSYLQSGVPSRFSGSGSGTDFTLTISSLQPEDFATYHCQQGYRWPVTFGQGTKVEIKR

SEQ ID NO: 944 - protein, 108 aa, Artificial Sequence
  Chemically synthesized ABT1-95-8
DIQMTQSPSSLSASVGDRVTITCRASQPIQGNLRWYQQKPGKAPKLLIYSSSYLERGVPSRFSGSGSGTDFTLTISSLQPEDFATYHCQQGYRWPVTFGQGTKVEIKR

SEQ ID NO: 945 - protein, 108 aa, Artificial Sequence
  Chemically synthesized ABTI-95-13
DIQMTQSPSSLSASVGDRVTITCRASQPIVRNLRWYQQKPGKAPKLLIYSSSYLERGVPSRFSGSGSGTDFTLTISSLQPEDFATYHCQQGYRWPVTFGQGTKVEIKR

SEQ ID NO: 946 - protein, 108 aa, Artificial Sequence
  Chemically synthesized ABT1-95-14
DIQMTQSPSSLSASVGDRVTITCRASQPIVKNLRWYQQKPGKAPKLLIYSSSYLERGVPSRFSGSGSGTDFTLTISSLQPEDFATYHCQQGYRWPVTFGQGTKVEIKR

SEQ ID NO: 947 - protein, 108 aa, Artificial Sequence
  Chemically synthesized ABT1-95-A3
DIQMTQSPSSLSASVGDRVTITCRASKPGVRNMRWYQQKPGKAPKLLIYSVSYLERGVPSRFSGSGSGTDFTLTISSLQPEDFATYHCLQGYRWPPTFGQGTKVEIKR

SEQ ID NO: 948 - protein, 108 aa, Artificial Sequence
  Chemically synthesized ABT1-122-18
DIQMTQSPSSLSASVGDRVTITCRASQPIWTELNWYQQKPGKAPKLLVYGSSSLQSGVPSRFSGSGSGTDFTLTISSLQPEDFATYYCQQFAYFPATFGQGTKVEIKR

SEQ ID NO: 949 - protein, 108 aa, Artificial Sequence
  Chemically synthesized ABT-141-47
DIQMTQSPSSLSASVGDRVTITCRANQWIQKQLAWYQQKPGKAPKLLIYSSSHLQSGVPSRFSGSGSGTDFTLTISSLQPQDFATYYCQQHLRVPMTFGQGTKVEIKR

SEQ ID NO: 950 - protein, 108 aa, Artificial Sequence
  Chemically synthesized ABT-141-76
DIQMTQSPSSLSASVGDRVTITCRANQWIQKQLAWYQQKPGKAPKLLIYSSSHLQSGVPSRFSGSGSGTDFTLTISSLQPEDFATYYCQQHLRVPMTFGQGTKVEIKR

SEQ ID NO: 951 - protein, 11 aa, Artificial Sequence
  Chemically synthesized CDR1 ABT1-122-751x
RASQHIWTELN

SEQ ID NO: 952 - protein, 7 aa, Artificial Sequence
  Chemically synthesized CDR2 ABT1-122-751x
GSASRQK

SEQ ID NO: 953 - protein, 9 aa, Artificial Sequence
  Chemically synthesized CDR3 ABT1-122-751x
KQFAYYPNT

SEQ ID NO: 954 - DNA, 19 bp, Artificial Sequence
  Synthetic primer: 2-108-Gap1Fwd
tgggtccgccaggctccag

SEQ ID NO: 955 - DNA, 20 bp, Artificial Sequence
  Synthetic primer: 2-108-Gap1Rev
aaaggtgaatccggaggctg

SEQ ID NO: 956 - DNA, 24 bp, Artificial Sequence
  Synthetic primer: 2-108Gap2Fwd
aatacatactacgcagactccgtg

SEQ ID NO: 957 - DNA, 18 bp, Artificial Sequence
  Synthetic primer: 2-108-Gap2Rev
tgagacccactcgagacc

SEQ ID NO: 958 - DNA, 18 bp, Artificial Sequence
  Synthetic primer: 2-108-Gap3Fwd
gactccgtgaagggccgg

SEQ ID NO: 959 - DNA, 19 bp, Artificial Sequence
  Synthetic primer: 2-108-Gap3Rev
atcctgcccaatacgtgag

SEQ ID NO: 960 - DNA, 18 bp, Artificial Sequence
  Synthetic primer: 2-108-Gap4Fwd
cggttcaccatctcccgc

SEQ ID NO: 961 - DNA, 24 bp, Artificial Sequence
  Synthetic primer: 2-108-Gap4Rev
gtatgtattcttaccatcctgccc

SEQ ID NO: 962 - DNA, 25 bp, Artificial Sequence
  Synthetic primer: 2-108-Gap5Fwd
catcatctttttgactactggggtc

SEQ ID NO: 963 - DNA, 21 bp, Artificial Sequence
  Synthetic primer: 2-108-Gap5Rev
tttcgcacagtaatataccgc

SEQ ID NO: 964 - DNA, 20 bp, Artificial Sequence
  Synthetic primer: 2-108-Gap6Fwd
gactactggggtcagggaac

SEQ ID NO: 965 - DNA, 20 bp, Artificial Sequence
  Synthetic primer: 2-108-Gap6Rev
aacccgacccgtatatttcg

SEQ ID NO: 966 - DNA, 18 bp, Artificial Sequence
  Synthetic primer: 2-108-Gap7Fwd
tggggtcagggaaccctg

SEQ ID NO: 967 - DNA, 20 bp, Artificial Sequence
  Synthetic primer: 2-108-Gap7Rev
atgatgaacaccaacccgac

SEQ ID NO: 968 - DNA, 100 bp, Artificial Sequence
  Synthetic primer: 1-95-15-L1
catcctccctgtctgcatctgtaggagaccgtgtcaccatcacttgccgggcaagtcagccgattgtgcggaacttaaggtggtatcagcagaaaccagg

SEQ ID NO: 969 - DNA, 100 bp, Artificial Sequence
  Synthetic primer: 1-95-15-L2
tggtatcagcagaaaccagggaaagcccctaagctcctgatctattcttcgtcctatttggagcccggggtcccatcacgtttcagtggtagtggatccg

SEQ ID NO: 970 - DNA, 100 bp, Artificial Sequence
  Synthetic primer: 1-95-15-L3
actctcaccatcagcagtctgcaacccgaagattttgctacgtaccactgtcaacaggggtatcgttggcctgttacgttcggccaagggaccaaggtgg

SEQ ID NO: 971 - DNA, 33 bp, Artificial Sequence
  Synthetic primer: 1-122 Gap 1 Rev new
gcaagtgatggtgacacggtctcctacagatgc

SEQ ID NO: 972 - DNA, 30 bp, Artificial Sequence
  Synthetic primer: 1-122 Gap 3 Rev new
atagatcaggagcttaggggctttccctgg

SEQ ID NO: 973 - DNA, 25 bp, Artificial Sequence
  Synthetic primer: 1-95 Gap4 Rev
acagtggtacgtagcaaaatcttcg

SEQ ID NO: 974 - DNA, 22 bp, Artificial Sequence
  Synthetic primer: pYD1 Fwd
agtaacgtttgtcagtaattgc

SEQ ID NO: 975 - DNA, 70 bp, Artificial Sequence
  Synthetic primer: ABTVKSCFV Rev
ttagggataggcttaccttcgaagggccctctagactcgagggcggccgcacgtttgatttccaccttgg

SEQ ID NO: 976 - protein, 27 aa, Artificial Sequence
  Chemically synthesized ABT1-95-15
RASQPIVRNLRSSSYLEPQQGYRWPVT

SEQ ID NO: 977 - protein, 27 aa, Artificial Sequence
  Chemically synthesized ABT1-95-15
RASQSNLRNLRSSSYLEPQQGYRWPVT

SEQ ID NO: 978 - protein, 27 aa, Artificial Sequence
  Chemically synthesized ABT1-95-15
RASRTPVRNLRSSSYLEPQQGYRWPVT

SEQ ID NO: 979 - protein, 27 aa, Artificial Sequence
  Chemically synthesized ABT1-95-15
RANRTRVRNLRSSSYLEPQQGYRWPVT

SEQ ID NO: 980 - protein, 27 aa, Artificial Sequence
  Chemically synthesized ABT1-95-15
RKNNPFVRNLRSSSYLEPQQGYRWPVT

SEQ ID NO: 981 - protein, 27 aa, Artificial Sequence
  Chemically synthesized ABT1-95-15
RKNHPNMRNLRSSSYLEPQQGYRWPVT

SEQ ID NO: 982 - protein, 27 aa, Artificial Sequence
  Chemically synthesized ABT1-95-15
RKNHPHIRNLRSSSYLEPQQGYRWPVT

SEQ ID NO: 983 - protein, 27 aa, Artificial Sequence
  Chemically synthesized ABT1-95-15
RKTHPTVRNLRSSSYLEPQQGYRWPVT

SEQ ID NO: 984 - protein, 27 aa, Artificial Sequence
  Chemically synthesized ABT1-95-15
RKAHPMVRNLRSSSYLEPQQGYRWPVT

SEQ ID NO: 985 - protein, 27 aa, Artificial Sequence
  Chemically synthesized ABT1-95-15
RKLQPFVRNLRSSSYLEPQQGYRWPVT

SEQ ID NO: 986 - protein, 27 aa, Artificial Sequence
  Chemically synthesized ABT1-95-15
RKSSPMVRNLRSSSYLEPQQGYRWPVT

SEQ ID NO: 987 - protein, 27 aa, Artificial Sequence
  Chemically synthesized ABT1-95-15
LKRHPSVRNLRSSSYLEPQQGYRWPVT

SEQ ID NO: 988 - protein, 27 aa, Artificial Sequence
  Chemically synthesized ABT1-95-15
LKRQPSVRNLRSSSYLEPQQGYRWPVT

SEQ ID NO: 989 - protein, 27 aa, Artificial Sequence
  Chemically synthesized ABT1-95-15
RKSHPFVRNLRSSSYLEPQQGYRWPVT

SEQ ID NO: 990 - protein, 27 aa, Artificial Sequence
  Chemically synthesized ABT1-95-15
RASQTRVQNLRSSSYLEPQQGYRWPVT

SEQ ID NO: 991 - protein, 27 aa, Artificial Sequence
  Chemically synthesized ABT1-95-15
RARRAPVRNLRSSSYLEPQQGYRWPVT

SEQ ID NO: 992 - protein, 27 aa, Artificial Sequence
  Chemically synthesized ABT1-95-15
RARNTPVRNLRSSSYLEPQQGYRWPVT

SEQ ID NO: 993 - protein, 27 aa, Artificial Sequence
  Chemically synthesized ABT1-95-15
RASRPNVRNLRSSSYLEPQQGYRWPVT

SEQ ID NO: 994 - protein, 27 aa, Artificial Sequence
  Chemically synthesized ABT1-95-15
RASRPIVRNLRSSSYLEPQQGYRWPVT

SEQ ID NO: 995 - protein, 27 aa, Artificial Sequence
  Chemically synthesized ABT1-95-15
RGSRPGIRNLRSSSYLEPQQGYRWPVT

SEQ ID NO: 996 - protein, 27 aa, Artificial Sequence
  Chemically synthesized ABT1-95-15
RRSGPNVRNLRSSSYLEPQQGYRWPVT

SEQ ID NO: 997 - protein, 27 aa, Artificial Sequence
  Chemically synthesized ABT1-95-15
LKSHPHVRNLRSSSYLEPQQGYRWPVT

SEQ ID NO: 998 - protein, 27 aa, Artificial Sequence
  Chemically synthesized ABT1-95-15
RASQPIVRNLRSVSYLEPQQGYRWPVT

SEQ ID NO: 999 - protein, 27 aa, Artificial Sequence
  Chemically synthesized ABT1-95-15
RASQPIVRNLRSRSYLEPQQGYRWPVT

SEQ ID NO: 1000 - protein, 27 aa, Artificial Sequence
  Chemically synthesized ABT1-95-15
RASQPIVRNLRSKSYLEPQQGYRWPVT

SEQ ID NO: 1001 - protein, 27 aa, Artificial Sequence
  Chemically synthesized ABT1-95-15
RASQPIVRNLRSVSWLEPQQGYRWPVT

SEQ ID NO: 1002 - protein, 27 aa, Artificial Sequence
  Chemically synthesized ABT1-95-15
RASQPIVRNLRSISYLEPQQGYRWPVT

SEQ ID NO: 1003 - protein, 27 aa, Artificial Sequence
  Chemically synthesized ABT1-95-15
RASQPIVRNLRSTKNVERQQGYRWPVT

SEQ ID NO: 1004 - protein, 27 aa, Artificial Sequence
  Chemically synthesized ABT1-95-15
RASQPIVRNLRSWSFLQPQQGYRWPVT

SEQ ID NO: 1005 - protein, 27 aa, Artificial Sequence
  Chemically synthesized ABT1-95-15
RASQPIVRNLRSSNYLAPQQGYRWPVT

SEQ ID NO: 1006 - protein, 27 aa, Artificial Sequence
  Chemically synthesized ABT1-95-15
RASQPIVRNLRARSYLEPQQGYRWPVT

SEQ ID NO: 1007 - protein, 27 aa, Artificial Sequence
  Chemically synthesized ABT1-95-15
RASQPIVRNLRSSSYLEPRMGYRWPVT

SEQ ID NO: 1008 - protein, 27 aa, Artificial Sequence
  Chemically synthesized ABT1-95-15
RASQPIVRNLRSSSYLEPKAGYVWPVP

SEQ ID NO: 1009 - protein, 27 aa, Artificial Sequence
  Chemically synthesized ABT1-95-15
RASQPIVRNLRSSSYLEPKAGYRWPVT

SEQ ID NO: 1010 - protein, 27 aa, Artificial Sequence
  Chemically synthesized ABT1-95-15
RASQPIVRNLRSSSYLEPRSGYRWPVT

SEQ ID NO: 1011 - protein, 27 aa, Artificial Sequence
  Chemically synthesized ABT1-95-A3
RASKPGVRNMRSVSYLEPLQGYRWPPT

SEQ ID NO: 1012 - protein, 27 aa, Artificial Sequence
  Chemically synthesized ABT1-95-A3
RASKPGVRNMRSVSYLEPQQGYRWPVT

SEQ ID NO: 1013 - protein, 27 aa, Artificial Sequence
  Chemically synthesized ABT1-95-A3
RASKPGVRNMRSVSYLEPRQGYRWPVT

SEQ ID NO: 1014 - protein, 27 aa, Artificial Sequence
  Chemically synthesized ABT1-95-A6
RASKPGVRNMRAKSYLEPKQGYRWPVQ

SEQ ID NO: 1015 - protein, 27 aa, Artificial Sequence
  Chemically synthesized ABT1-95-A6
RASKPGVRNMRAKSYLEPQQGYRWPVT

SEQ ID NO: 1016 - protein, 27 aa, Artificial Sequence
  Chemically synthesized ABT1-95-A6
RASKPGVRNMRSKSYLEPQQGYRWPVT

SEQ ID NO: 1017 - protein, 27 aa, Artificial Sequence
  Chemically synthesized ABT1-95-A6
RASKPGVRNMRSSSYLNPQQGYRWPVT

SEQ ID NO: 1018 - protein, 27 aa, Artificial Sequence
  Chemically synthesized ABT1-95-A6
RASKAGVRNLRSVSYLEPLQGYRWPPT

SEQ ID NO: 1019 - protein, 27 aa, Artificial Sequence
  Chemically synthesized ABT1-95-A6
RASKAGVRNLRSVSWLEPRQGYVWPVP

SEQ ID NO: 1020 - protein, 27 aa, Artificial Sequence
  Chemically synthesized ABT1-95-A4
RASRPGVRNLRSRSFLEPLQGYRWPPT

SEQ ID NO: 1021 - protein, 27 aa, Artificial Sequence
  Chemically synthesized ABT1-95-A4
RASRPGVRNLRSRSFLEPQQGYRWPVT

SEQ ID NO: 1022 - protein, 27 aa, Artificial Sequence
  Chemically synthesized ABT1-95-A4
RASRPGVRNLRSVSFLEPRQGYVWPVP

SEQ ID NO: 1023 - protein, 27 aa, Artificial Sequence
  Chemically synthesized ABT1-95-A4
RASRPGVRNLRSVSYLEPLQGYRWPPT

SEQ ID NO: 1024 - protein, 27 aa, Artificial Sequence
  Chemically synthesized ABT1-95-A1
RASRPGVRNLRHVSDLEPRQGYVWPVP

SEQ ID NO: 1025 - protein, 27 aa, Artificial Sequence
  Chemically synthesized ABT1-95-A1
RGSRPGIRNLRSVSFLEPLQGYRWPPT

SEQ ID NO: 1026 - protein, 27 aa, Artificial Sequence
  Chemically synthesized ABT1-95-A1
RGSRPGIRNLRASSNLEPQQGYRWPVT

SEQ ID NO: 1027 - protein, 27 aa, Artificial Sequence
  Chemically synthesized ABT1-95-A5
RASRTPVRNLRSRSFLEPLQGYRWPPT

SEQ ID NO: 1028 - protein, 27 aa, Artificial Sequence
  Chemically synthesized ABT1-95-A5
QASQPGVRNMRSVSFLEPRQGYRWPVT

SEQ ID NO: 1029 - protein, 27 aa, Artificial Sequence
  Chemically synthesized ABT1-95-A5
QASQPGVRNMRSVSYLEPQQGYRWPVT

SEQ ID NO: 1030 - protein, 27 aa, Artificial Sequence
  Chemically synthesized ABT1-95-A5
QASQPGVRNMRSTSSLQPQQGYRWPVT

SEQ ID NO: 1031 - protein, 27 aa, Artificial Sequence
  Chemically synthesized ABT1-95-A2
RILQPPGRNLRSKSFLEPQQGYRWPVT

SEQ ID NO: 1032 - protein, 27 aa, Artificial Sequence
  Chemically synthesized ABT1-95-A2
RASHGGVRNLRSASYLEPQQGYRWPVT

SEQ ID NO: 1033 - protein, 27 aa, Artificial Sequence
  Chemically synthesized ABT1-95-A2
RASHSPVRNLRSVSYLEPKAGYVWPVP

SEQ ID NO: 1034 - protein, 27 aa, Artificial Sequence
  Chemically synthesized ABT1-95-A2
RAGHPRVRNLRSSSYLQPQQGYRWPVT

SEQ ID NO: 1035 - protein, 27 aa, Artificial Sequence
  Chemically synthesized ABT1-95-A2
RASNQRVRNLRSVSYLEPQQGYRWPVT

SEQ ID NO: 1036 - protein, 27 aa, Artificial Sequence
  Chemically synthesized ABT1-95-A2
RKNHPDVRNLRSSSLLEPQQGYRWPVT

SEQ ID NO: 1037 - protein, 27 aa, Artificial Sequence
  Chemically synthesized ABT1-95-A2
RKSQPNMRNLRSTSLLDRQQGYRWPVT

SEQ ID NO: 1038 - protein, 27 aa, Artificial Sequence
  Chemically synthesized ABT1-95-A2
RASQPGVRNLRSSSYLEPQQGYRWPVT

SEQ ID NO: 1039 - protein, 27 aa, Artificial Sequence
  Chemically synthesized ABT1-95-A2
RASQPSVRNLRSKSYLEPQQGYRWPVT

SEQ ID NO: 1040 - DNA, 30 bp, Artificial Sequence
  Synthetic primer:  2-108 Gap 1 Fwd new
tgggtccgccaggctccagggaagggtctc

SEQ ID NO: 1041 - DNA, 30 bp, Artificial Sequence
  Synthetic primer:  2-108 Gap 1 Rev new
aaaggtgaatccggaggctgcacaggagag

SEQ ID NO: 1042 - DNA, 30 bp, Artificial Sequence
  Synthetic primer:  2-108 Gap 2 Fwd new
aatacatactacgcagactccgtgaagggc

SEQ ID NO: 1043 - DNA, 30 bp, Artificial Sequence
  Synthetic primer:  2-108 Gap 2 Rev new
tgagacccactcgagacccttccctggagc

SEQ ID NO: 1044 - DNA, 30 bp, Artificial Sequence
  Synthetic primer:  2-108 Gap 3 Fwd new
gactccgtgaagggccggttcaccatctcc

SEQ ID NO: 1045 - DNA, 30 bp, Artificial Sequence
  Synthetic primer:  2-108 Gap 3 Rev new
atcctgcccaatacgtgagacccactcgag

SEQ ID NO: 1046 - DNA, 30 bp, Artificial Sequence
  Synthetic primer:  2-108 Gap 4 Fwd new
cggttcaccatctcccgcgacaattccaag

SEQ ID NO: 1047 - DNA, 30 bp, Artificial Sequence
  Synthetic primer:  2-108 Gap 4 Rev new
gtatgtattcttaccatcctgcccaatacg

SEQ ID NO: 1048 - DNA, 32 bp, Artificial Sequence
  Synthetic primer:  2-108 Gap 5 Fwd new
catcatctttttgactactggggtcagggaac

SEQ ID NO: 1049 - DNA, 30 bp, Artificial Sequence
  Synthetic primer:  2-108 Gap 5 Rev new
tttcgcacagtaatataccgcggtgtcctc

SEQ ID NO: 1050 - DNA, 30 bp, Artificial Sequence
  Synthetic primer:  2-108 Gap 6 Fwd new
gactactggggtcagggaaccctggtcacc

SEQ ID NO: 1051 - DNA, 33 bp, Artificial Sequence
  Synthetic primer:  2-108 Gap 6 Rev new
aacccgacccgtatatttcgcacagtaatatac

SEQ ID NO: 1052 - DNA, 32 bp, Artificial Sequence
  Synthetic primer:  1-122 Gap 1 Fwd new
actgagttaaattggtatcagcagaaaccagg

SEQ ID NO: 1053 - DNA, 33 bp, Artificial Sequence; identical to SEQ ID NO: 971
  Synthetic primer:  1-122 Gap 1 Rev new

SEQ ID NO: 1054 - DNA, 33 bp, Artificial Sequence
  Synthetic primer:  1-122 Gap 2 Fwd new
tggtatcagcagaaaccagggaaagcccctaag

SEQ ID NO: 1055 - DNA, 28 bp, Artificial Sequence
  Synthetic primer:  1-122 Gap 2 Rev new
cggctgacttgcccggcaagtgatggtg

SEQ ID NO: 1056 - DNA, 29 bp, Artificial Sequence
  Synthetic primer:  1-122 Gap 3 Fwd new
ggggtcccatcacgtttcagtggcagtgg

SEQ ID NO: 1057 - DNA, 30 bp, Artificial Sequence; identical to SEQ ID NO: 972
  Synthetic primer:  1-122 Gap 3 Rev new

SEQ ID NO: 1058 - DNA, 33 bp, Artificial Sequence
  Synthetic primer:  1-122 Gap 4 Fwd new
gctacgttcggccaagggaccaaggtggaaatc

SEQ ID NO: 1059 - DNA, 33 bp, Artificial Sequence
  Synthetic primer:  1-122 Gap 4 Rev new
acagtagtacgtagcaaaatcttcaggttgcag

SEQ ID NO: 1060 - DNA, 32 bp, Artificial Sequence
  Synthetic primer:  1-122 Gap 5 Fwd new
ttcggccaagggaccaaggtggaaatcaaacg

SEQ ID NO: 1061 - DNA, 33 bp, Artificial Sequence
  Synthetic primer:  1-122 Gap 5 Rev new
agcaaactgttgacagtagtacgtagcaaaatc

SEQ ID NO: 1062 - DNA, 23 bp, Artificial Sequence
  Synthetic primer:  2-108-CDR1F
caagtatttcggagtgcctgaac

SEQ ID NO: 1063 - DNA, 23 bp, Artificial Sequence
  Synthetic primer:  2-108-CDR2F
gtccgccaggctccagggaaagg

SEQ ID NO: 1064 - DNA, 23 bp, Artificial Sequence
  Synthetic primer:  2-108-CDR2R
tcgcacagtaatataccgcggtg

SEQ ID NO: 1065 - DNA, 24 bp, Artificial Sequence
  Synthetic primer:  2-108-CDR3R
gcattggtgactattgagcacgtg

SEQ ID NO: 1066 - protein, 35 aa, Artificial Sequence
  Chemically synthesized ABT2-108-601
EESWMRIGQDGKNTYYADSVKGYTGRVGVHHLFDY

SEQ ID NO: 1067 - protein, 35 aa, Artificial Sequence
  Chemically synthesized ABT2-108-602
EEKYMRIGQDGKNTYYADSVKGYTGRVGVHHLFDY

SEQ ID NO: 1068 - protein, 35 aa, Artificial Sequence
  Chemically synthesized ABT2-108-603
EYTMMRITDAGKNTYYADSVKGYTGRVGVHHLFDY

SEQ ID NO: 1069 - protein, 35 aa, Artificial Sequence
  Chemically synthesized ABT2-108-604
EYTMMRVTYDGKNTYYADSVKGYTGRVGVHHLFDY

SEQ ID NO: 1070 - protein, 35 aa, Artificial Sequence
  Chemically synthesized ABT2-108-605
EYTMMRIGQDGKNTYYREDVKGYTGRVGVHHLFDY

SEQ ID NO: 1071 - protein, 35 aa, Artificial Sequence
  Chemically synthesized ABT2-108-606
EYTMMRIGQDGKNTYYRSSVKGYTGRVGVHHLFDY

SEQ ID NO: 1072 - protein, 35 aa, Artificial Sequence
  Chemically synthesized ABT2-108-607
EYTMMRIGQDGKNTYYRSDVKGYTGRVGVHHLFDY

SEQ ID NO: 1073 - protein, 35 aa, Artificial Sequence
  Chemically synthesized ABT2-108-608
EYTMMRIGQDGKNTYTRDSVKGYTGRVGVHHLFDY

SEQ ID NO: 1074 - protein, 35 aa, Artificial Sequence
  Chemically synthesized ABT2-108-609
EYTMMRIGQDGKNTVYRDSVKGYTGRVGVHHLFDY

SEQ ID NO: 1075 - protein, 35 aa, Artificial Sequence
  Chemically synthesized ABT2-108-610
EYTMMRIGQDGKNTVVRDSVKGYTGRVGVHHLFDY

SEQ ID NO: 1076 - protein, 35 aa, Artificial Sequence; identical to SEQ ID NO: 898
  Chemically synthesized ABT2-108-611

SEQ ID NO: 1077 - protein, 35 aa, Artificial Sequence
  Chemically synthesized ABT2-108-612
EYTMMRIGQDGKNTYYADSVKGYTGRIMGHHLFDY

SEQ ID NO: 1078 - protein, 35 aa, Artificial Sequence
  Chemically synthesized ABT2-108-613
EYTMMRIGQDGKNTYYADSVKGYTGRVFEHHLFDY

SEQ ID NO: 1079 - protein, 35 aa, Artificial Sequence
  Chemically synthesized ABT2-108-614
EYTMMRIGQDGKNTYYADSVKGYTGRILRHHLFDY

SEQ ID NO: 1080 - protein, 35 aa, Artificial Sequence; identical to SEQ ID NO: 897
  Chemically synthesized ABT2-108-615

SEQ ID NO: 1081 - protein, 35 aa, Artificial Sequence
  Chemically synthesized ABT2-108-616
EYTMMRIGQDGKNTYYADSVKGYTGRIYNHHLFDY

SEQ ID NO: 1082 - protein, 35 aa, Artificial Sequence
  Chemically synthesized ABT2-108-617
EYTMMRIGQDGKNTYYADSVKGYTGRIFTHHLFDY

SEQ ID NO: 1083 - protein, 35 aa, Artificial Sequence
  Chemically synthesized ABT2-108-618
EEYFMRIGQDGKNTYYADSVKGYTGRVGVHHLFDY

SEQ ID NO: 1084 - protein, 34 aa, Artificial Sequence
  Chemically synthesized ABT2-108-619
EYTMMRHGWDGKKYYADSVKGYTGRVGVHHLFDY

SEQ ID NO: 1085 - protein, 28 aa, Artificial Sequence
  Chemically synthesized ABT1-122
RASQPIWTELNGSSSLQSQQFAYFPATF

SEQ ID NO: 1086 - protein, 28 aa, Artificial Sequence
  Chemically synthesized ABT1-122-501
RFSYPIWTELNGSSSLQSQQFAYFPATF

SEQ ID NO: 1087 - protein, 28 aa, Artificial Sequence
  Chemically synthesized ABT1-122-502
RAVYLIWTELNGSSSLQSQQFAYFPATF

SEQ ID NO: 1088 - protein, 28 aa, Artificial Sequence
  Chemically synthesized ABT1-122-503
RASQPIWTELNGSSSLQSEQFAYFPATF

SEQ ID NO: 1089 - protein, 28 aa, Artificial Sequence
  Chemically synthesized ABT1-122-504
RASQPIWTELNGSSSLQSKQFAYFSATF

SEQ ID NO: 1090 - protein, 28 aa, Artificial Sequence
  Chemically synthesized ABT1-122-505
RASQPIWTELNGSSSLQSKQFAYFPATF

SEQ ID NO: 1091 - protein, 28 aa, Artificial Sequence
  Chemically synthesized ABT1-122-506
RASQPIWTELNGSMHTQSQQFAYFPATF

SEQ ID NO: 1092 - protein, 28 aa, Artificial Sequence
  Chemically synthesized ABT1-122-507
RASQPIWTELNRSSSLQSQQFAYFPATF

SEQ ID NO: 1093 - protein, 28 aa, Artificial Sequence
  Chemically synthesized ABT1-122-508
RASQPIWTELNGSSSLQRQQFAYFPATF

SEQ ID NO: 1094 - protein, 28 aa, Artificial Sequence
  Chemically synthesized ABT1-122-509
RASQPIWTELNGHAELQSQQFAYFPATF

SEQ ID NO: 1095 - protein, 29 aa, Artificial Sequence
  Chemically synthesized ABT1-6
GAYDMQSINKSGALTSYDSVKGGWASFDY

SEQ ID NO: 1096 - protein, 29 aa, Artificial Sequence
  Chemically synthesized ABT1-6-3
GAYDMQSIYKSGALTSYDSVKGGWASFDY

SEQ ID NO: 1097 - protein, 29 aa, Artificial Sequence
  Chemically synthesized ABT1-6-15
VRYDMASINKSGALTSYDSVKGGWASFDY

SEQ ID NO: 1098 - protein, 29 aa, Artificial Sequence
  Chemically synthesized ABT1-6-23
VRYDMASIYKSGALTSYDSVKGGWASFDY

SEQ ID NO: 1099 - DNA, 36 bp, Artificial Sequence
  Synthetic primer:  StufferLightSignal (SLS)-Rev
tcggcataccatgcgcatcgcgagccggggaaccac

SEQ ID NO: 1100 - DNA, 29 bp, Artificial Sequence
  Synthetic primer:  StufferLightSignal (SLS)-Fwd
cgatgcgcatggtatgccgaaagggatgc

SEQ ID NO: 1101 - DNA, 25 bp, Artificial Sequence
  Synthetic primer:  StufferHeavySignal (SHS)-Rev
gcactggacaccttttaaaatcgcg

SEQ ID NO: 1102 - DNA, 46 bp, Artificial Sequence
  Synthetic primer:  StufferHeavySignal (SHS)-Fwd
cgattttaaaaggtgtccagtgcgcatggtatgccgaaagggatgc

SEQ ID NO: 1103 - DNA, 20 bp, Artificial Sequence
  Synthetic primer:  pEF-BOS-Rev
ggagacctgatactctcaag

SEQ ID NO: 1104 - DNA, 18 bp, Artificial Sequence
  Synthetic primer:  pEF-BOS-Fwd
tcaggtgtcgtgaggaat

SEQ ID NO: 1105 - DNA, 36 bp, Artificial Sequence
  Synthetic primer:  mIgG2a-Rev
gttttagcgctacactggacaccttttaaaatcgcg

SEQ ID NO: 1106 - DNA, 36 bp, Artificial Sequence
  Synthetic primer:  mIgG2a-Fwd
ggtgtccagtgtagcgctaaaacaacagccccatcg

SEQ ID NO: 1107 - DNA, 35 bp, Artificial Sequence
  Synthetic primer:  mIgG1-Rev
cgttttagcgctacactggacaccttttaaaatcg

SEQ ID NO: 1108 - DNA, 35 bp, Artificial Sequence
  Synthetic primer:  mIgG1-Fwd
ggtgtccagtgtagcgctaaaacgacacccccatc

SEQ ID NO: 1109 - DNA, 36 bp, Artificial Sequence
  Synthetic primer:  mCkappa-Rev
gcagcatcagcgctgcatcgcgagccggggaaccac

SEQ ID NO: 1110 - DNA, 34 bp, Artificial Sequence
  Synthetic primer:  mCkappa-Fwd
ggctcgcgatgcagcgctgatgctgcaccaactg

SEQ ID NO: 1111 - DNA, 18 bp, Artificial Sequence
  Synthetic primer:  LambdaStuffer-Rev
gcttgtcacccaggaacg

SEQ ID NO: 1112 - DNA, 22 bp, Artificial Sequence
  Synthetic primer:  LambdaStuffer-Fwd
cgaaagggatgctgaaattgag

SEQ ID NO: 1113 - DNA, 30 bp, Artificial Sequence
  Synthetic primer:  LambdaSignal-Rev
catccctttcgcgataagcttcctgtgcag

SEQ ID NO: 1114 - DNA, 33 bp, Artificial Sequence
  Synthetic primer:  LambdaSignal-Fwd
gaagcttatcgcgaaagggatgctgaaattgag

SEQ ID NO: 1115 - DNA, 31 bp, Artificial Sequence
  Synthetic primer:  hCLambda-Rev
gccttgggttaacgcttgtcacccaggaacg

SEQ ID NO: 1116 - DNA, 36 bp, Artificial Sequence
  Synthetic primer:  hCLambda-Fwd
ggtgacaagcgttaacccaaggctgccccctcggtc

SEQ ID NO: 1117 - DNA, 33 bp, Artificial Sequence
  Synthetic primer:  hCkappa-Rev2
cagccaccgtacgtagcttgtcacccaggaacg

SEQ ID NO: 1118 - DNA, 33 bp, Artificial Sequence
  Synthetic primer:  hCkappa-Fwd2
gtgacaagctacgtacggtggctgcaccatctg

SEQ ID NO: 1119 - DNA, 30 bp, Artificial Sequence
  Synthetic primer:  hCGamma1-Rev
cttggtcgacgcgcttgtcacccaggaacg

SEQ ID NO: 1120 - DNA, 34 bp, Artificial Sequence
  Synthetic primer:  hCGamma1-Fwd
ggtgacaagcgcgtcgaccaagggcccatcggtc

SEQ ID NO: 1121 - DNA, 26 bp, Artificial Sequence
  Synthetic primer:  5'Sal198
tctacgactacggtatggacgtctgg

SEQ ID NO: 1122 - DNA, 22 bp, Artificial Sequence
  Synthetic primer:  3'Sal198
gccgtccacgtaccagttgaac

SEQ ID NO: 1123 - DNA, 29 bp, Artificial Sequence
  Synthetic primer:  5'BSR198
cctccagcaacttcggcacccagacctac

SEQ ID NO: 1124 - DNA, 25 bp, Artificial Sequence
  Synthetic primer:  3'BSR198
acctggttcttggtcatctcctccc

SEQ ID NO: 1125 - DNA, 31 bp, Artificial Sequence
  Synthetic primer:  5'GME198
gttcaactggtacgtggacggcatggaggtg

SEQ ID NO: 1126 - DNA, 39 bp, Artificial Sequence
  Synthetic primer:  3'TSS198
gtaggtctgggtgccgaagttgctggaggtcacggtcac

SEQ ID NO: 1127 - DNA, 20 bp, Artificial Sequence
  Synthetic primer:  Lambda844
aagcgtttcactaatgggcg

SEQ ID NO: 1128 - DNA, 22 bp, Artificial Sequence
  Synthetic primer:  F1042
ataagcggccgcgactctagag

SEQ ID NO: 1129 - DNA, 20 bp, Artificial Sequence
  Synthetic primer:  F1541
tcaccctccacctcttcacc

SEQ ID NO: 1130 - DNA, 19 bp, Artificial Sequence
  Synthetic primer:  F2058
ggactccaacgtcaaaggg

SEQ ID NO: 1131 - DNA, 19 bp, Artificial Sequence
  Synthetic primer:  F2538
aaacgcgcgagacgaaagg

SEQ ID NO: 1132 - DNA, 18 bp, Artificial Sequence
  Synthetic primer:  F3071
aaagcatcttacggatgg

SEQ ID NO: 1133 - DNA, 22 bp, Artificial Sequence
  Synthetic primer:  F3553
atgaacgaaatagacagatcgc

SEQ ID NO: 1134 - DNA, 18 bp, Artificial Sequence
  Synthetic primer:  F4068
ttaccggataaggcgcag

SEQ ID NO: 1135 - DNA, 18 bp, Artificial Sequence
  Synthetic primer:  F4557
atacgcaaaccgcctctc

SEQ ID NO: 1136 - DNA, 22 bp, Artificial Sequence
  Synthetic primer:  F5060
ttgcagctaatggaccttctag

SEQ ID NO: 1137 - DNA, 20 bp, Artificial Sequence
  Synthetic primer:  F5551
aatctggtggcaccttcgcg

SEQ ID NO: 1138 - DNA, 21 bp, Artificial Sequence
  Synthetic primer:  F6068
ttctcgagcttttggagtacg

SEQ ID NO: 1139 - DNA, 20 bp, Artificial Sequence
  Synthetic primer:  R1527
gggtgacagtggagcttcct

SEQ ID NO: 1140 - DNA, 18 bp, Artificial Sequence
  Synthetic primer:  R2023
actcttgttccaaactgg

SEQ ID NO: 1141 - DNA, 20 bp, Artificial Sequence
  Synthetic primer:  R2530
tctcgcgcgtttcggtgatg

SEQ ID NO: 1142 - DNA, 21 bp, Artificial Sequence
  Synthetic primer:  R3056
tgcttttctgtgactggtgag

SEQ ID NO: 1143 - DNA, 21 bp, Artificial Sequence
  Synthetic primer:  R3535
catccatagttgcctgactcc

SEQ ID NO: 1144 - DNA, 19 bp, Artificial Sequence
  Synthetic primer:  R4036
tccaacccggtaagacacg

SEQ ID NO: 1145 - DNA, 20 bp, Artificial Sequence
  Synthetic primer:  R4552
aggcggtttgcgtattgggc

SEQ ID NO: 1146 - DNA, 22 bp, Artificial Sequence
  Synthetic primer:  R5051
ccattagctgcaaagattcctc

SEQ ID NO: 1147 - DNA, 19 bp, Artificial Sequence
  Synthetic primer:  R5548
aaggtgccaccagattcgc

SEQ ID NO: 1148 - DNA, 20 bp, Artificial Sequence
  Synthetic primer:  R6051
gaactaatcgaggtgcctgg

SEQ ID NO: 1149 - DNA, 20 bp, Artificial Sequence
  Synthetic primer:  R6300
atggatctcgaggtcgaggg

SEQ ID NO: 1150 - DNA, 15 bp, Artificial Sequence
  Synthetic linker peptide
ggggsggggsggggs

SEQ ID NO: 1151 - DNA, 43 bp, Artificial Sequence
  Synthetic primer:  SCFCVH 5'
gactgcgtcgacgcgtacggaggtgcagctgttggagtctggg

SEQ ID NO: 1152 - DNA, 54 bp, Artificial Sequence
  Synthetic primer:  GSBAMVH 3'
tccacctccaccggatccaccacctccgctcgagacggtgaccagggttccctg

SEQ ID NO: 1153 - DNA, 78 bp, Artificial Sequence
  Synthetic primer:  FCBAMB 5'
ggaggtggtggatccggtggaggtggatctggtggtggtggatcacccaaatcttgtgacaaaactcacacatgccca

SEQ ID NO: 1154 - DNA, 20 bp, Artificial Sequence
  Synthetic primer:  1926 3'
ggagacctgatactctcaag

SEQ ID NO: 1155 - DNA, 12 bp, Artificial Sequence
  Chemically synthesized CDR1-1 library
  misc_feature (1)..(1): Preceded by residues: Pro Ile
  misc_feature (1)..(2): n is a, c, g, or t
  misc_feature (4)..(5): n is a, c, g, or t
  misc_feature (7)..(8): n is a, c, g, or t
  misc_feature (9)..(9): Followed by a Leu residue
  misc_feature (10)..(11): n is a, c, g, or t
nnsnnsnnsnns

SEQ ID NO: 1156 - DNA, 12 bp, Artificial Sequence
  Chemically synthesized CDR1-2 library
  misc_feature (1)..(2): n is a, c, g, or t
  misc_feature (4)..(5): n is a, c, g, or t
  misc_feature (6)..(6): Followed by residues: Ile His
  misc_feature (7)..(8): n is a, c, g, or t
  misc_feature (10)..(11): n is a, c, g, or t
  misc_feature (12)..(12): Followed by residues: Leu Arg
nnsnnsnnsnns

SEQ ID NO: 1157 - protein, 7 aa, Artificial Sequence
  Chemically synthesized CDR2/3 library
  misc_feature (1)..(1): Preceded by three nucleotide bases: nns (where n is a, c, g, or t)
  misc_feature (3)..(3): Followed by six nucleotide bases: nns nns (where n is a, c, g, or t)
  misc_feature (7)..(7): Followed by three nucleotide bases: nns (where n is a, c, g, or t)
SSSYRWP

SEQ ID NO: 1158 - DNA, 12 bp, Artificial Sequence
  Chemically synthesized CDR3 library
  misc_feature (1)..(2): n is a, c, g, or t
  misc_feature (3)..(3): Followed by a Cys residue
  misc_feature (4)..(5): n is a, c, g, or t
  misc_feature (6)..(6): Followed by a Gln residue
  misc_feature (7)..(8): n is a, c, g, or t
  misc_feature (9)..(9): Followed by a Tyr residue
  misc_feature (10)..(11): n is a, c, g, or t
  misc_feature (12)..(12): Followed by residues: Trp Pro Val
nnsnnsnnsnns
